(19) United States
(12) Patent Application Publication
(10) Pub. No.: US 2026/0193623 A1
(43) Pub. Date: Jul. 9, 2026

(54) RETROTRANSPOSON COMPOSITIONS AND METHODS OF USE

(71) Applicant: Metagenomi, Inc., Emeryville, CA (US)

(72) Inventors: Brian C. THOMAS, Berkeley, CA (US); Lisa ALEXANDER, Albany, CA (US); Christopher BROWN, Albany, CA (US); Cindy CASTELLE, San Francisco, CA (US); Daniela S.A. GOLTSMAN, Oakland, CA (US); Sarah LAPERRIERE, Berkeley, CA (US); Morayma TEMOCHE-DIAZ, Emeryville, CA (US); Anu THOMAS, Emeryville, CA (US); Mary Kaitlyn CHIU (née TSAI), San Francisco, CA (US)

(73) Assignee: Metagenomi, Inc., Emeryville, CA (US)

(21) Appl. No.: 19/131,137

(22) PCT Filed: Dec. 8, 2023
(86) PCT No.: PCT/US2023/083224

§ 371 Date: May 19, 2025

Related U.S. Application Data
(60) Provisional application No. 63/386,865, filed on Dec. 9, 2022.
(60) Provisional application No. 63/489,154, filed on Mar. 8, 2023.
(60) Provisional application No. 63/491,939, filed on Mar. 23, 2023.
(60) Provisional application No. 63/501,373, filed on May 10, 2023.

(51) Int. Cl. C12N 9/12; C07K 14/005; C12N 1/16; C12N 5/04; C12N 5/07; C12N 5/071; C12N 5/10; C12N 9/22; C12N 15/10; C12N 15/52; C12N 15/864; C12N 15/867

(52) U.S. Cl. CPC C12N 9/1276; C07K 14/005; C12N 1/16; C12N 5/04; C12N 5/0601; C12N 5/0602; C12N 5/10; C12N 9/22; C12N 15/1096; C12N 15/52; C12N 15/8645; C12N 15/867; C12Y 207/07049; C07K 2319/09; C12N 2510/04; C12N 2740/15043; C12N 2750/14143; C12N 2800/10; C12N 2800/90

(57) ABSTRACT

The present disclosure provides systems and methods for transposing a cargo nucleotide sequence to a target nucleic acid sequence. These systems and methods can comprise a nucleic acid comprising the cargo nucleotide sequence, wherein the cargo nucleotide sequence is configured to interact with a retrotransposase, and the retrotransposase, wherein the retrotransposase is configured to transpose the cargo nucleotide sequence to the target nucleic acid sequence. The systems and methods can also involve use of functional fragments of retrotransposases.

### CROSS-REFERENCE

[0001] This application claims the benefit of and priority to U.S. Provisional Patent Application No. 63/386,865, filed Dec. 9, 2022, U.S. Provisional Patent Application No. 63/489,154 filed Mar. 8, 2023, U.S. Provisional Patent Application No. 63/491,939 filed Mar. 23, 2023, and U.S. Provisional Patent Application No. 63/501,373 filed May 10, 2023, each of which is incorporated by reference in its entirety herein.

### BACKGROUND

[0002] Transposable elements are movable DNA sequences and play a crucial role in gene function and evolution. While transposable elements are found in nearly all forms of life, their prevalence varies among organisms, with a large proportion of the eukaryotic genome encoding for transposable elements.

### SUMMARY

[0003] While the foundational research on transposable elements was conducted in the 1940s, their potential utility in DNA manipulation and gene editing applications has only been recognized in recent years.

[0004] Described herein, in certain embodiments, are engineered retrotransposase systems, comprising: (a) a double-stranded nucleic acid comprising a cargo nucleotide sequence configured to form a complex with a retrotransposase; and (b) a retrotransposase configured to transpose the cargo nucleotide sequence to a target nucleic acid sequence and comprising an amino acid sequence having at least 75% sequence identity to any one of SEQ ID NOs: 1-29, 393-735, 799-895, 1020-1476, 1544-1554, 1850-2160, 2165-2210, and 2258-2266. In some embodiments, the retrotransposase comprises an amino acid sequence having at least 80% sequence identity to any one of SEQ ID NOs: 1-29, 393-735, 799-895, 1020-1476, 1544-1554, 1850-2160, 2165-2210, and 2258-2266. In some embodiments, the retrotransposase comprises an amino acid sequence having at least 90% sequence identity to any one of SEQ ID NOs: 1-29, 393-735, 799-895, 1020-1476, 1544-1554, 1850-2160, 2165-2210, and 2258-2266. In some embodiments, the retrotransposase comprises an amino acid sequence having at least 95% sequence identity to any one of SEQ ID NOs: 1-29, 393-735, 799-895, 1020-1476, 1544-1554, 1850-2160, 2165-2210, and 2258-2266. In some embodiments, the retrotransposase is encoded by a nucleic acid having at least 75% sequence identity to any one of SEQ ID NOs: 120-173, 181-187, 193-197, 203-207, 217-225, 231-235, 241-245, 251-255, 267-277, 288-297, 303-307, 324-339, 964-981, 1003-1019, 1504-1520, 1521-1536, 1539-1543, 1556-1568, and 1611-1806. In some embodiments, the retrotransposase is encoded by a nucleic acid sequence having at least 80% sequence identity to any one of SEQ ID NOs: 120-173, 181-187, 193-197, 203-207, 217-225, 231-235, 241-245, 251-255, 267-277, 288-297, 303-307, 324-339, 964-981, 1003-1019, 1504-1520, 1521-1536, 1539-1543, 1556-1568, and 1611-1806. In some embodiments, retrotransposase is encoded by a nucleic acid sequence having at least 90% sequence identity to any one of SEQ ID NOs: 120-173, 181-187, 193-197, 203-207, 217-225, 231-235, 241-245, 251-255, 267-277, 288-297, 303-307, 324-339, 964-981, 1003-1019, 1504-1520, 1521-1536, 1539-1543, 1556-1568, and 1611-1806. In some embodiments, retrotransposase is encoded by a nucleic acid sequence having at least 95% sequence identity to any one of SEQ ID NOs: 120-173, 181-187, 193-197, 203-207, 217-225, 231-235, 241-245, 251-255, 267-277, 288-297, 303-307, 324-339, 964-981, 1003-1019, 1504-1520, 1521-1536, 1539-1543, 1556-1568, and 1611-1806. In some embodiments, the double-stranded nucleic acid comprises a 5′ recognition sequence comprising a GG nucleotide sequence and a 3′ recognition sequence comprising a TGAC nucleotide sequence. In some embodiments, the 5′ recognition sequence and the 3′ recognition sequence are configured to interact with the retrotransposase. In some embodiments, the double-stranded nucleic acid comprising a cargo nucleotide sequence is RNA. In some embodiments, the RNA is an in vitro transcribed RNA. In some embodiments, the RNA comprises a sequence 5′ to said cargo sequence or a sequence 3′ to said cargo sequence that has at least 80% sequence identity to an RNA cognate of any one of SEQ ID NOs: 761-798, 2161-2164, and 2211-2257, a complement thereof, or a reverse complement thereof.

[0005] Described herein, in certain embodiments, are engineered retrotransposase systems, comprising: (a) a double-stranded nucleic acid comprising a cargo nucleotide sequence configured to form a complex with a retrotransposase; and (b) a retrotransposase configured to transpose the cargo nucleotide sequence to a target nucleic acid sequence and comprising an amino acid sequence having at least 75% sequence identity to any one of SEQ ID NOs: 1-29, 393-401, 799-894, 1476, 1850-1926, and 2165-2210. In some embodiments, the retrotransposase is encoded by a nucleic acid sequence having at least 80% sequence identity to any one of SEQ ID NOs: SEQ ID NOs: 1535-1536, 1542-1543, 1611-1623, 1663-1691, and 1786-1806.

[0006] Described herein, in certain embodiments, are engineered retrotransposase systems, comprising: (a) a double-stranded nucleic acid comprising a cargo nucleotide sequence configured to form a complex with a retrotransposase; and (b) a retrotransposase configured to transpose the cargo nucleotide sequence to a target nucleic acid sequence and comprising an amino acid sequence having at least 75% sequence identity to SEQ ID NO: 402 or SEQ ID NO: 895.

[0007] Described herein, in certain embodiments, are engineered retrotransposase systems, comprising: (a) a double-stranded nucleic acid comprising a cargo nucleotide sequence configured to form a complex with a retrotransposase; and (b) a retrotransposase configured to transpose the cargo nucleotide sequence to a target nucleic acid sequence and comprising an amino acid sequence having at least 75% sequence identity to SEQ ID NO: 388.

[0008] Described herein, in certain embodiments, are engineered retrotransposase systems, comprising: (a) a double-stranded nucleic acid comprising a cargo nucleotide sequence configured to form a complex with a retrotransposase; and (b) a retrotransposase configured to transpose the cargo nucleotide sequence to a target nucleic acid sequence and comprising an amino acid sequence having at least 75% sequence identity to any one of SEQ ID NOs: 403-426. In some embodiments, the retrotransposase is encoded by a nucleic acid sequence having at least 80% sequence identity to any one of SEQ ID NOs: 389-392 and 1504-1507.

[0009] Described herein, in certain embodiments, are engineered retrotransposase systems, comprising: (a) a double-stranded nucleic acid comprising a cargo nucleotide sequence configured to form a complex with a retrotransposase; and (b) a retrotransposase configured to transpose the cargo nucleotide sequence to a target nucleic acid sequence and comprising an amino acid sequence having at least 75% sequence identity to any one of SEQ ID NOs: 427-439.

[0010] Described herein, in certain embodiments, are engineered retrotransposase systems, comprising: (a) a double-stranded nucleic acid comprising a cargo nucleotide sequence configured to form a complex with a retrotransposase; and (b) a retrotransposase configured to transpose the cargo nucleotide sequence to a target nucleic acid sequence and comprising an amino acid sequence having at least 75% sequence identity to any one of SEQ ID NOs: 440-554 and 1020-1037. In some embodiments, the retrotransposase is encoded by a nucleic acid sequence having at least 80% sequence identity to any one of SEQ ID NOs: 356-373, 964-981, and 1003-1019.

[0011] Described herein, in certain embodiments, are engineered retrotransposase systems, comprising: (a) a double-stranded nucleic acid comprising a cargo nucleotide sequence configured to form a complex with a retrotransposase; and (b) a retrotransposase configured to transpose the cargo nucleotide sequence to a target nucleic acid sequence and comprising an amino acid sequence having at least 75% sequence identity to any one of SEQ ID NOs: 555-608 and 1927-2010. In some embodiments, the retrotransposase is encoded by a nucleic acid sequence having at least 80% sequence identity to any one of SEQ ID NOs: 66-173, 740-756, 1521-1534, 1539-1541, 1624-1637, 1645-1662, and 1701-1782.

[0012] Described herein, in certain embodiments, are engineered retrotransposase systems, comprising: (a) a double-stranded nucleic acid comprising a cargo nucleotide sequence configured to form a complex with a retrotransposase; and (b) a retrotransposase configured to transpose the cargo nucleotide sequence to a target nucleic acid sequence and comprising an amino acid sequence having at least 75% sequence identity to any one of SEQ ID NOs: 609-610 and 1555. In some embodiments, the retrotransposase is encoded by a nucleic acid sequence having at least 80% sequence identity to any one of SEQ ID NOs: 308-309 and 324-325.

[0013] Described herein, in certain embodiments, are engineered retrotransposase systems, comprising: (a) a double-stranded nucleic acid comprising a cargo nucleotide sequence configured to form a complex with a retrotransposase; and (b) a retrotransposase configured to transpose the cargo nucleotide sequence to a target nucleic acid sequence and comprising an amino acid sequence having at least 75% sequence identity to any one of SEQ ID NOs: 611-615 and 1544-1545. In some embodiments, the retrotransposase is encoded by a nucleic acid sequence having at least 80% sequence identity to any one of SEQ ID NOs: 310-312, 326-328, 1556-1557, and 1569-1570.

[0014] Described herein, in certain embodiments, are engineered retrotransposase systems, comprising: (a) a double-stranded nucleic acid comprising a cargo nucleotide sequence configured to form a complex with a retrotransposase; and (b) a retrotransposase configured to transpose the cargo nucleotide sequence to a target nucleic acid sequence and comprising an amino acid sequence having at least 75% sequence identity to SEQ ID NO: 616 or SEQ ID NO: 617. In some embodiments, the retrotransposase is encoded by a nucleic acid sequence having at least 80% sequence identity to any one of SEQ ID NOs: 313-314 and 329-330.

[0015] Described herein, in certain embodiments, are engineered retrotransposase systems, comprising: (a) a double-stranded nucleic acid comprising a cargo nucleotide sequence configured to form a complex with a retrotransposase; and (b) a retrotransposase configured to transpose the cargo nucleotide sequence to a target nucleic acid sequence and comprising an amino acid sequence having at least 75% sequence identity to any one of SEQ ID NOs: 618-622 and 2258-2266. In some embodiments, the retrotransposase is encoded by a nucleic acid sequence having at least 80% sequence identity to any one of SEQ ID NOs: 315-319 and 331-335.

[0016] Described herein, in certain embodiments, are engineered retrotransposase systems, comprising: (a) a double-stranded nucleic acid comprising a cargo nucleotide sequence configured to form a complex with a retrotransposase; and (b) a retrotransposase configured to transpose the cargo nucleotide sequence to a target nucleic acid sequence and comprising an amino acid sequence having at least 75% sequence identity to SEQ ID NO: 623. In some embodiments, the retrotransposase is encoded by a nucleic acid sequence having at least 80% sequence identity to SEQ ID NO: 320 or SEQ ID NO: 336.

[0017] Described herein, in certain embodiments, are engineered retrotransposase systems, comprising: (a) a double-stranded nucleic acid comprising a cargo nucleotide sequence configured to form a complex with a retrotransposase; and (b) a retrotransposase configured to transpose the cargo nucleotide sequence to a target nucleic acid sequence and comprising an amino acid sequence having at least 75% sequence identity to any one of SEQ ID NOs: 624-626. In some embodiments, the retrotransposase is encoded by a nucleic acid sequence having at least 80% sequence identity to any one of SEQ ID NOs: 321-323, 337-339, and 1785.

[0018] Described herein, in certain embodiments, are engineered retrotransposase systems, comprising: (a) a double-stranded nucleic acid comprising a cargo nucleotide sequence configured to form a complex with a retrotransposase; and (b) a retrotransposase configured to transpose the cargo nucleotide sequence to a target nucleic acid sequence and comprising an amino acid sequence having at least 75% sequence identity to any one of SEQ ID NOs: 624-626. In some embodiments, the retrotransposase is encoded by a nucleic acid sequence having at least 80% sequence identity to any one of SEQ ID NOs: 321-323, 337-339, and 1785.

[0019] Described herein, in certain embodiments, are engineered retrotransposase systems, comprising: (a) a double-stranded nucleic acid comprising a cargo nucleotide sequence configured to form a complex with a retrotransposase; and (b) a retrotransposase configured to transpose the cargo nucleotide sequence to a target nucleic acid sequence and comprising an amino acid sequence having at least 75% sequence identity to any one of SEQ ID NOs: 627-673, 1039-1475, and 2011-2026. In some embodiments, the retrotransposase is encoded by a nucleic acid sequence having at least 80% sequence identity to any one of SEQ ID NOs: 174-187 and 1508-1520.

[0020] Described herein, in certain embodiments, are engineered retrotransposase systems, comprising: (a) a double-stranded nucleic acid comprising a cargo nucleotide sequence configured to form a complex with a retrotransposase; and (b) a retrotransposase configured to transpose the cargo nucleotide sequence to a target nucleic acid sequence and comprising an amino acid sequence having at least 75% sequence identity to any one of SEQ ID NOs: 674-678. In some embodiments, the retrotransposase is encoded by a nucleic acid sequence having at least 80% sequence identity to any one of SEQ ID NOs: 188-197.

[0021] Described herein, in certain embodiments, are engineered retrotransposase systems, comprising: (a) a double-stranded nucleic acid comprising a cargo nucleotide sequence configured to form a complex with a retrotransposase; and (b) a retrotransposase configured to transpose the cargo nucleotide sequence to a target nucleic acid sequence and comprising an amino acid sequence having at least 75% sequence identity to any one of SEQ ID NOs: 679-683. In some embodiments, the retrotransposase is encoded by a nucleic acid sequence having at least 80% sequence identity to any one of SEQ ID NOs: 198-207.

[0022] Described herein, in certain embodiments, are engineered retrotransposase systems, comprising: (a) a double-stranded nucleic acid comprising a cargo nucleotide sequence configured to form a complex with a retrotransposase; and (b) a retrotransposase configured to transpose the cargo nucleotide sequence to a target nucleic acid sequence and comprising an amino acid sequence having at least 75% sequence identity to any one of SEQ ID NOs: 684-692 and 2027-2046. In some embodiments, the retrotransposase is encoded by a nucleic acid sequence having at least 80% sequence identity to any one of SEQ ID NOs: 208-225 and 757-759.

[0023] Described herein, in certain embodiments, are engineered retrotransposase systems, comprising: (a) a double-stranded nucleic acid comprising a cargo nucleotide sequence configured to form a complex with a retrotransposase; and (b) a retrotransposase configured to transpose the cargo nucleotide sequence to a target nucleic acid sequence and comprising an amino acid sequence having at least 75% sequence identity to any one of SEQ ID NOs: 693-697 and 2047-2090. In some embodiments, the retrotransposase is encoded by a nucleic acid sequence having at least 80% sequence identity to any one of SEQ ID NOs: 226-235.

[0024] Described herein, in certain embodiments, are engineered retrotransposase systems, comprising: (a) a double-stranded nucleic acid comprising a cargo nucleotide sequence configured to form a complex with a retrotransposase; and (b) a retrotransposase configured to transpose the cargo nucleotide sequence to a target nucleic acid sequence and comprising an amino acid sequence having at least 75% sequence identity to any one of SEQ ID NOs: 698-702 and 2091-2119. In some embodiments, the retrotransposase is encoded by a nucleic acid sequence having at least 80% sequence identity to any one of SEQ ID NOs: 236-245 and 759-760.

[0025] Described herein, in certain embodiments, are engineered retrotransposase systems, comprising: (a) a double-stranded nucleic acid comprising a cargo nucleotide sequence configured to form a complex with a retrotransposase; and (b) a retrotransposase configured to transpose the cargo nucleotide sequence to a target nucleic acid sequence and comprising an amino acid sequence having at least 75% sequence identity to any one of SEQ ID NOs: 703-707. In some embodiments, the retrotransposase is encoded by a nucleic acid sequence having at least 80% sequence identity to any one of SEQ ID NOs: 246-255.

[0026] Described herein, in certain embodiments, are engineered retrotransposase systems, comprising: (a) a double-stranded nucleic acid comprising a cargo nucleotide sequence configured to form a complex with a retrotransposase; and (b) a retrotransposase configured to transpose the cargo nucleotide sequence to a target nucleic acid sequence and comprising an amino acid sequence having at least 75% sequence identity to any one of SEQ ID NOs: 708-718 and 2121-2159. In some embodiments, the retrotransposase is encoded by a nucleic acid sequence having at least 80% sequence identity to any one of SEQ ID NOs: 256-277, 1638-1644, and 1693-1700.

[0027] Described herein, in certain embodiments, are engineered retrotransposase systems, comprising: (a) a double-stranded nucleic acid comprising a cargo nucleotide sequence configured to form a complex with a retrotransposase; and (b) a retrotransposase configured to transpose the cargo nucleotide sequence to a target nucleic acid sequence and comprising an amino acid sequence having at least 75% sequence identity to any one of SEQ ID NOs: 719-728. In some embodiments, the retrotransposase is encoded by a nucleic acid sequence having at least 80% sequence identity to any one of SEQ ID NOs: 278-297.

[0028] Described herein, in certain embodiments, are engineered retrotransposase systems, comprising: (a) a double-stranded nucleic acid comprising a cargo nucleotide sequence configured to form a complex with a retrotransposase; and (b) a retrotransposase configured to transpose the cargo nucleotide sequence to a target nucleic acid sequence and comprising an amino acid sequence having at least 75% sequence identity to any one of SEQ ID NOs: 729-733. In some embodiments, the retrotransposase is encoded by a nucleic acid sequence having at least 80% sequence identity to any one of SEQ ID NOs: 298-307.

[0029] Described herein, in certain embodiments, are engineered retrotransposase systems, comprising: (a) a double-stranded nucleic acid comprising a cargo nucleotide sequence configured to form a complex with a retrotransposase; and (b) a retrotransposase configured to transpose the cargo nucleotide sequence to a target nucleic acid sequence and comprising an amino acid sequence having at least 75% sequence identity to any one of SEQ ID NOs: 734-735 and 1546-1553. In some embodiments, the retrotransposase is encoded by a nucleic acid sequence having at least 80% sequence identity to any one of SEQ ID NOs: 1558-1567, 1571-1580, and 1783-1784.

[0030] Described herein, in certain embodiments, are engineered retrotransposase systems, comprising: (a) a double-stranded nucleic acid comprising a cargo nucleotide sequence configured to form a complex with a retrotransposase; and (b) a retrotransposase configured to transpose the cargo nucleotide sequence to a target nucleic acid sequence and comprising an amino acid sequence having at least 75% sequence identity to SEQ ID NO: 1038 or SEQ ID NO: 2160. In some embodiments, the retrotransposase is encoded by a nucleic acid sequence having at least 80% sequence identity to SEQ ID NO: 1692.

[0031] Described herein, in certain embodiments, are engineered retrotransposase systems, comprising: (a) a double-stranded nucleic acid comprising a cargo nucleotide sequence configured to form a complex with a retrotransposase; and (b) a retrotransposase configured to transpose the cargo nucleotide sequence to a target nucleic acid sequence and comprising an amino acid sequence having at least 75% sequence identity to SEQ ID NO: 1554. In some embodiments, the retrotransposase is encoded by a nucleic acid sequence having at least 80% sequence identity to SEQ ID NO: 1568 or SEQ ID NO: 1594. In some embodiments, the retrotransposase comprises one or more nuclear localization sequences (NLSs) proximal to an N- or C-terminus of the retrotransposase. In some embodiments, the NLS comprises a sequence at least 80% identical to a sequence from the group consisting of SEQ ID NO: 1477-1492. In some embodiments, the NLS comprises SEQ ID NO: 1478. In some embodiments, the NLS is proximal to the N-terminus of the retrotransposase. In some embodiments, the NLS comprises SEQ ID NO: 1477. In some embodiments, the NLS is proximal to the C-terminus of the retrotransposase.

[0032] Described herein, in certain embodiments, are polypeptides comprising a reverse transcriptase comprising an amino acid sequence having at least 75% sequence identity to any one of SEQ ID NOs: 1-29, 393-735, 799-895, 1020-1476, 1544-1554, 1850-2160, 2165-2210, and 2258-2266 fused N- or C-terminally to a non-retrotransposase domain or an affinity tag. In some embodiments, the non-retrotransposase domain is an RNA-binding protein domain. In some embodiments, the RNA binding protein domain comprises a bacteriophage MS2 coat protein (MCP) domain.

[0033] Described herein, in certain embodiments, are nucleic acids encoding the engineered retrotransposase system described herein or the polypeptide described herein.

[0034] Described herein, in certain embodiments, are methods for modifying a target nucleic acid sequence comprising contacting the target nucleic acid sequence using the engineered nuclease system described herein. In some embodiments, modifying the target nucleic acid sequence comprises binding, nicking, or cleaving, the target nucleic acid sequence. In some embodiments, the target nucleic acid sequence comprises genomic DNA, viral DNA, viral RNA, or bacterial DNA. In some embodiments, the target nucleic acid sequence comprises deoxyribonucleic acid (DNA). In some embodiments, the modification is in vitro. In some embodiments, the modification is in vivo. In some embodiments, the modification is ex vivo.

[0035] Described herein, in certain embodiments, are methods of modifying a target nucleic acid sequence in a mammalian cell comprising contacting the mammalian cell using the engineered nuclease system described herein.

[0036] Described herein, in certain embodiments, are methods for synthesizing complementary DNA (cDNA), comprising: (a) providing an RNA molecule as a template for cDNA synthesis, (b) providing a primer oligonucleotide to initiate cDNA synthesis from the RNA molecule; and (c) synthesizing cDNA initiated by the primer oligonucleotide from the template using a reverse transcriptase comprising a sequence having at least 80% sequence identity to a reverse transcriptase domain of any one of SEQ ID NOs: 1-29, 393-735, 799-895, 1020-1476, 1544-1554, 1850-2160, 2165-2210, and 2258-2266. In some embodiments, the primer oligonucleotide comprises an oligo (dT) sequence or a degenerate sequence of at least six oligonucleotides.

[0037] Described herein, in certain embodiments, are vectors comprising the nucleic acid described herein. In some embodiments, the vector is a plasmid, a minicircle, a CELiD, an adeno-associated virus (AAV) derived virion, or a lentivirus.

[0038] Described herein, in certain embodiments, are cells comprising the engineered nuclease system described herein or the polypeptide described herein. In some embodiments, the cell is a eukaryotic cell. In some embodiments, the cell is a mammalian cell. In some embodiments, the cell is an immortalized cell. In some embodiments, the cell is an insect cell. In some embodiments, the cell is a yeast cell. In some embodiments, the cell is a plant cell. In some embodiments, the cell is a fungal cell. In some embodiments, the cell is a prokaryotic cell. In some embodiments, the cell is an A549, HEK-293, HEK-293T, BHK, CHO, HeLa, MRC5, Sf9, Cos-1, Cos-7, Vero, BSC 1, BSC 40, BMT 10, WI38, HeLa, Saos, C2C12, L cell, HT1080, HepG2, Huh7, K562, primary cell, or a derivative thereof. In some embodiments, the cell is an engineered cell. In some embodiments, the cell is a stable cell.

[0039] In some aspects, the present disclosure provides for an engineered retrotransposase system, comprising: (a) an RNA comprising a heterologous engineered cargo nucleotide sequence, wherein the cargo nucleotide sequence is configured to interact with a retrotransposase; and (b) a retrotransposase, wherein: (i) the retrotransposase is configured to transpose the cargo nucleotide sequence to a target nucleic acid locus; and (ii) the retrotransposase comprises a reverse transcriptase (RT) domain, an endonuclease domain comprising a sequence having at least about 80%, at least about 81%, at least about 82%, at least about 83%, at least about 84%, at least about 85%, at least about 86%, at least about 87%, at least about 88%, at least about 89%, at least about 90%, at least about 91%, at least about 92%, at least about 93%, at least about 94%, at least about 95%, at least about 96%, at least about 97%, at least about 98%, at least about 99%, or 100% sequence identity to an RT or endonuclease domain of any one of SEQ ID NOs: 1-29, 393-735, 799-895, 1020-1476, and 1546-1553. In some embodiments, the retrotransposase further comprises any of the Zn-binding ribbon motifs of any one of SEQ ID NOs: 1-29, 393-735, 799-895, 1020-1476, 1544-1554, 1850-2160, 2165-2210, and 2258-2266. In some embodiments, the retrotransposase further comprises a sequence having at least 80% sequence identity to any one of SEQ ID NOs: 1-29, 393-735, 799-895, 1020-1476, 1544-1554, 1850-2160, 2165-2210, and 2258-2266. In some embodiments, the retrotransposase further comprises a conserved catalytic D, QG, [Y/F]XDD, or LG motif. In some embodiments, the retrotransposase further comprises a conserved CX_{[2-3]}C Zn finger motif. In some embodiments, the retrotransposase comprises a sequence having at least 80% sequence identity to any one of SEQ ID NOs: 3, 6, 7, 8, 14, and 402. In some embodiments, the system further comprises: (c) a double-stranded DNA sequence comprising the target nucleic acid locus. In some embodiments, the double-stranded DNA sequence comprises a 5′ recognition sequence and a 3′ recognition sequence configured to interact with the retrotransposase, wherein the 5′ recognition sequence comprises a GG nucleotide sequence and the 3′ recognition sequence comprises a TGAC nucleotide sequence. In some embodiments, the RNA is an in vitro transcribed RNA. In some embodiments, the RNA comprises a sequence 5′ to the cargo sequence or a sequence 3′ to the cargo sequence that has at least about 80%, at least about 81%, at least about 82%, at least about 83%, at least about 84%, at least about 85%, at least about 86%, at least about 87%, at least about 88%, at least about 89%, at least about 90%, at least about 91%, at least about 92%, at least about 93%, at least about 94%, at least about 95%, at least about 96%, at least about 97%, at least about 98%, at least about 99%, or 100% sequence identity to an RNA cognate of any one of SEQ ID NOs: 761-798, 2161-2164, and 2211-2257, a complement thereof, or a reverse complement thereof. In some embodiments, the RNA comprises a sequence encoding the retrotransposase. In some embodiments, the heterologous engineered cargo nucleotide sequence comprises an expression cassette.

[0040] In some embodiments, the present disclosure provides for an engineered DNA sequence, comprising: (a) a 5′ sequence capable of encoding an RNA sequence configured to interact with a retrotransposase; (b) a heterologous cargo sequence; (c) a sequence encoding a retrotransposase configured to interact with an RNA cognate of the 5′ sequence, wherein the retrotransposase comprises a reverse transcriptase (RT) domain or an endonuclease domain comprising a sequence having at least about 80%, at least about 81%, at least about 82%, at least about 83%, at least about 84%, at least about 85%, at least about 86%, at least about 87%, at least about 88%, at least about 89%, at least about 90%, at least about 91%, at least about 92%, at least about 93%, at least about 94%, at least about 95%, at least about 96%, at least about 97%, at least about 98%, at least about 99%, or 100% sequence identity to a RT or endonuclease domain of any one of SEQ ID NOs: 1-29, 393-735, 799-895, 1020-1476, 1544-1554, 1850-2160, 2165-2210, and 2258-2266; and (d) a 3′ sequence capable of encoding an RNA sequence configured to interact with the retrotransposase. In some embodiments, the retrotransposase further comprises any of the Zn-binding ribbon motifs of any one of SEQ ID NOs: 1-29, 393-735, 799-895, 1020-1476, 1544-1554, 1850-2160, 2165-2210, and 2258-2266. In some embodiments, the retrotransposase further comprises a sequence having at least 80% sequence identity to any one of SEQ ID NOs: 1-29, 393-735, 799-895, 1020-1476, 1544-1554, 1850-2160, 2165-2210, and 2258-2266. In some embodiments, the retrotransposase further comprises a conserved catalytic D, QG, [Y/F]XDD or LG motif. In some embodiments, the retrotransposase further comprises a conserved CX [2-3]C Zn finger motif. In some embodiments, the retrotransposase comprises a sequence having at least 80% sequence identity to any one of SEQ ID NOs: 3, 6, 7, 8, 14, and 402. In some embodiments, the 5′ sequence or the 3′ sequence comprises a sequence having at least about 80%, at least about 81%, at least about 82%, at least about 83%, at least about 84%, at least about 85%, at least about 86%, at least about 87%, at least about 88%, at least about 89%, at least about 90%, at least about 91%, at least about 92%, at least about 93%, at least about 94%, at least about 95%, at least about 96%, at least about 97%, at least about 98%, at least about 99%, or 100% sequence identity to an RNA cognate of any one of SEQ ID NOs: 761-798, 2161-2164, and 2211-2257, a complement thereof, or a reverse complement thereof.

[0041] In some aspects, the present disclosure provides for a method for synthesizing complementary DNA (cDNA), comprising: (a) providing an RNA molecule as a template for cDNA synthesis, (b) providing a primer oligonucleotide to initiate cDNA synthesis from the RNA molecule; and (c) synthesizing cDNA initiated by the primer oligonucleotide from the template using a reverse transcriptase comprising a sequence having at least about 80%, at least about 81%, at least about 82%, at least about 83%, at least about 84%, at least about 85%, at least about 86%, at least about 87%, at least about 88%, at least about 89%, at least about 90%, at least about 91%, at least about 92%, at least about 93%, at least about 94%, at least about 95%, at least about 96%, at least about 97%, at least about 98%, at least about 99%, or 100% sequence identity to a reverse transcriptase domain of any one of SEQ ID NOs: 1-29, 393-735, 799-895, 1020-1476, 1544-1554, 1850-2160, 2165-2210, and 2258-2266. In some embodiments, the reverse transcriptase comprises a sequence having at least 80% sequence identity to any one of SEQ ID NOs: 1-29, 393-735, 799-895, 1020-1476, 1544-1554, 1850-2160, 2165-2210, and 2258-2266. In some embodiments, the primer oligonucleotide comprises an oligo (dT) sequence or a degenerate sequence of at least six oligonucleotides. In some embodiments, the synthesizing cDNA comprises incubating the template RNA molecule, the primer oligonucleotide, and the reverse transcriptase in a reaction mixture under conditions suitable for extension of a DNA sequence from the RNA template. In some embodiments, the reaction mixture further comprises dNTPs, a reaction buffer, divalent metal ions, Mg²⁺, or Mn²⁺.

[0042] In some aspects, the present disclosure provides for a polypeptide comprising a reverse transcriptase domain comprising a sequence having at least about 80%, at least about 81%, at least about 82%, at least about 83%, at least about 84%, at least about 85%, at least about 86%, at least about 87%, at least about 88%, at least about 89%, at least about 90%, at least about 91%, at least about 92%, at least about 93%, at least about 94%, at least about 95%, at least about 96%, at least about 97%, at least about 98%, at least about 99%, or 100% sequence identity to a reverse transcriptase domain of any one of SEQ ID NOs: 1-29, 393-735, 799-895, 1020-1476, 1544-1554, 1850-2160, 2165-2210, and 2258-2266, wherein the sequence is fused N- or C-terminally to a non-retrotransposase domain or an affinity tag. In some embodiments, the reverse transcriptase domain comprises a sequence having at least 80% sequence identity to any one of SEQ ID NOs: 1-29, 393-735, 799-895, 1020-1476, 1544-1554, 1850-2160, 2165-2210, and 2258-2266. In some embodiments, the non-retrotransposase domain is an RNA-binding protein domain. In some embodiments, the RNA binding protein domain comprises a bacteriophage MS2 coat protein (MCP) domain.

[0043] In some aspects, the present disclosure provides for a nucleic acid encoding any of the polypeptides described herein.

[0044] In some aspects, the present disclosure provides for a nucleic acid encoding an open reading frame, wherein the open reading frame encodes an RT or endonuclease domain having at least about 80%, at least about 81%, at least about 82%, at least about 83%, at least about 84%, at least about 85%, at least about 86%, at least about 87%, at least about 88%, at least about 89%, at least about 90%, at least about 91%, at least about 92%, at least about 93%, at least about 94%, at least about 95%, at least about 96%, at least about 97%, at least about 98%, at least about 99%, or 100% sequence identity to an RT or endonuclease domain of any one of SEQ ID NOs: 1-29, 393-735, 799-895, 1020-1476, 1544-1554, 1850-2160, 2165-2210, and 2258-2266, wherein: (a) the open reading frame is optimized for expression in an organism and the organism is different to the origin of the RT or endonuclease domain; or (b) the ORF comprises a sequence encoding an affinity tag. In some embodiments, the nucleic acid further encodes a retrotransposase comprising a sequence having at least about 80%, at least about 81%, at least about 82%, at least about 83%, at least about 84%, at least about 85%, at least about 86%, at least about 87%, at least about 88%, at least about 89%, at least about 90%, at least about 91%, at least about 92%, at least about 93%, at least about 94%, at least about 95%, at least about 96%, at least about 97%, at least about 98%, at least about 99%, or 100% sequence identity to an RT or endonuclease domain of any one of SEQ ID NOs: 1-29, 393-735, 799-895, 1020-1476, 1544-1554, 1850-2160, 2165-2210, and 2258-2266.

[0045] In some embodiments, the present disclosure provides for an engineered retrotransposase system, comprising: (a) an RNA comprising a heterologous engineered cargo nucleotide sequence, wherein the cargo nucleotide sequence is configured to interact with a retrotransposase; and (b) a retrotransposase, wherein: (i) the retrotransposase is configured to transpose the cargo nucleotide sequence to a target nucleic acid locus; and (ii) the retrotransposase comprises a reverse transcriptase (RT) domain or an endonuclease domain comprising a sequence having at least about 80%, at least about 81%, at least about 82%, at least about 83%, at least about 84%, at least about 85%, at least about 86%, at least about 87%, at least about 88%, at least about 89%, at least about 90%, at least about 91%, at least about 92%, at least about 93%, at least about 94%, at least about 95%, at least about 96%, at least about 97%, at least about 98%, at least about 99%, or 100% sequence identity to a RT or endonuclease domain of SEQ ID NO: 402 or 895. In some embodiments, the retrotransposase further comprises any of the Zn-binding ribbon motifs of SEQ ID NO: 402 or 895. In some embodiments, the retrotransposase further comprises a sequence having at least 80% sequence identity to SEQ ID NO: 402 or 895. In some embodiments, the retrotransposase further comprises a conserved catalytic D, QG, [Y/F]XDD, or LG motif of SEQ ID NO: 402 or 895. In some embodiments, the retrotransposase further comprises a conserved CX_{[2-3]}C Zn finger motif of SEQ ID NO: 402 or 895. In some embodiments, the system further comprises: (c) a double-stranded DNA sequence comprising the target locus. In some embodiments, the RNA is an in vitro transcribed RNA. In some embodiments, the RNA comprises a sequence encoding the retrotransposase.

[0046] In some aspects, the present disclosure provides for an engineered DNA sequence, comprising: (a) a 5′ sequence capable of encoding an RNA sequence configured to interact with a retrotransposase; (b) a heterologous cargo sequence; (c) a sequence encoding a retrotransposase configured to interact with an RNA cognate of the 5′ sequence, wherein the retrotransposase comprises a reverse transcriptase (RT) domain, an endonuclease domain comprising a sequence having at least about 80%, at least about 81%, at least about 82%, at least about 83%, at least about 84%, at least about 85%, at least about 86%, at least about 87%, at least about 88%, at least about 89%, at least about 90%, at least about 91%, at least about 92%, at least about 93%, at least about 94%, at least about 95%, at least about 96%, at least about 97%, at least about 98%, at least about 99%, or 100% sequence identity to a RT or endonuclease domain of SEQ ID NO: 402 or 895; and (d) a 3′ sequence capable of encoding an RNA sequence configured to interact with the retrotransposase. In some embodiments, the retrotransposase further comprises any of the Zn-binding ribbon motifs of SEQ ID NO: 402 or 895. In some embodiments, the retrotransposase further comprises a sequence having at least 80% sequence identity to SEQ ID NO: 402 or 895. In some embodiments, the retrotransposase further comprises a conserved catalytic D, QG, [Y/F]XDD or LG motif of SEQ ID NO: 402 or 895. In some embodiments, the retrotransposase further comprises a conserved CX_{[2-3]}C Zn finger motif of SEQ ID NO: 402 or 895.

[0047] In some aspects, the present disclosure provides for a method for synthesizing complementary DNA (cDNA), comprising: (a) providing an RNA molecule as a template for cDNA synthesis, (b) providing a primer oligonucleotide to initiate cDNA synthesis from the RNA molecule; and (c) synthesizing cDNA initiated by the primer oligonucleotide from the template using a reverse transcriptase comprising a sequence having at least about 80%, at least about 81%, at least about 82%, at least about 83%, at least about 84%, at least about 85%, at least about 86%, at least about 87%, at least about 88%, at least about 89%, at least about 90%, at least about 91%, at least about 92%, at least about 93%, at least about 94%, at least about 95%, at least about 96%, at least about 97%, at least about 98%, at least about 99%, or 100% sequence identity to a reverse transcriptase domain of SEQ ID NO: 402 or 895. In some embodiments, the reverse transcriptase comprises a sequence having at least 80% sequence identity to SEQ ID NO: 402 or 895. In some embodiments, the primer oligonucleotide comprises an oligo (dT) sequence or a degenerate sequence of at least six oligonucleotides. In some embodiments, the synthesizing cDNA comprises incubating the template RNA molecule, the primer oligonucleotide, and the reverse transcriptase in a reaction mixture under conditions suitable for extension of a DNA sequence from the RNA template. In some embodiments, the reaction mixture further comprises dNTPs, a reaction buffer, divalent metal ions, Mg²⁺, or Mn²⁺.

[0048] In some aspects, the present disclosure provides for a polypeptide comprising a reverse transcriptase domain comprising a sequence having at least about 80%, at least about 81%, at least about 82%, at least about 83%, at least about 84%, at least about 85%, at least about 86%, at least about 87%, at least about 88%, at least about 89%, at least about 90%, at least about 91%, at least about 92%, at least about 93%, at least about 94%, at least about 95%, at least about 96%, at least about 97%, at least about 98%, at least about 99%, or 100% sequence identity to a reverse transcriptase domain of SEQ ID NO: 402 or 895, wherein the sequence is fused N- or C-terminally to a non-retrotransposase domain or an affinity tag. In some embodiments, the reverse transcriptase domain comprises a sequence having at least 80% sequence identity to SEQ ID NO: 402 or 895. In some embodiments, the non-retrotransposase domain is an RNA-binding protein domain. In some embodiments, the RNA binding protein domain comprises a bacteriophage MS2 coat protein (MCP) domain.

[0049] In some aspects, the present disclosure provides for a nucleic acid encoding an open reading frame, wherein the open reading frame encodes an RT or endonuclease domain having at least about 80%, at least about 81%, at least about 82%, at least about 83%, at least about 84%, at least about 85%, at least about 86%, at least about 87%, at least about 88%, at least about 89%, at least about 90%, at least about 91%, at least about 92%, at least about 93%, at least about 94%, at least about 95%, at least about 96%, at least about 97%, at least about 98%, at least about 99%, or 100% sequence identity to an RT or endonuclease domain of SEQ ID NO: 402 or 895, wherein: (a) the open reading frame is optimized for expression in an organism and the organism is different to the origin of the RT or endonuclease domain; or (b) the ORF comprises a sequence encoding an affinity tag. In some embodiments, the nucleic acid further encodes a retrotransposase comprising a sequence having at least 80% sequence identity to SEQ ID NO: 402 or 895.

[0050] In some aspects, the present disclosure provides for a method for synthesizing complementary DNA (cDNA), comprising: (a) providing an RNA molecule as a template for cDNA synthesis, (b) providing a primer oligonucleotide to initiate cDNA synthesis from the RNA molecule; and (c) synthesizing cDNA initiated by the primer oligonucleotide from the template using a reverse transcriptase comprising a sequence having at least about 80%, at least about 81%, at least about 82%, at least about 83%, at least about 84%, at least about 85%, at least about 86%, at least about 87%, at least about 88%, at least about 89%, at least about 90%, at least about 91%, at least about 92%, at least about 93%, at least about 94%, at least about 95%, at least about 96%, at least about 97%, at least about 98%, at least about 99%, or 100% sequence identity to a reverse transcriptase domain of any one of SEQ ID NOs: 555-728. In some embodiments, the reverse transcriptase comprises a sequence having at least 80% sequence identity to any one of SEQ ID NOs: 555-560, 563, 564, 566, 567, 569, 572, 574, 580-582, 584-588, 592, 593, 596, 602, 604, 605, 608, 561, 562, 564, 565, 568, 571, 573, 576-579, 583, 590, 591, 594, 598, 601, 606, and 607. In some embodiments, the reverse transcriptase comprises a sequence having at least 80% sequence identity to any one of SEQ ID NOs: 555-560, 563, 564, 566, 567, 569, 572, 574, 580-582, 584-588, 592, 593, 596, 602, 604, 605, and 608. In some embodiments, the primer oligonucleotide comprises an oligo (dT) sequence or a degenerate sequence of at least six oligonucleotides. In some embodiments, the primer oligonucleotide comprises at least one phosphorothioate linkage. In some embodiments, the synthesizing cDNA comprises incubating the template RNA molecule, the primer oligonucleotide, and the reverse transcriptase in a reaction mixture under conditions suitable for extension of a DNA sequence from the RNA template. In some embodiments, the reaction mixture further comprises dNTPs, a reaction buffer, divalent metal ions, Mg²⁺, or Mn²⁺.

[0051] In some aspects, the present disclosure provides for a polypeptide comprising a reverse transcriptase domain comprising a sequence having at least about 80%, at least about 81%, at least about 82%, at least about 83%, at least about 84%, at least about 85%, at least about 86%, at least about 87%, at least about 88%, at least about 89%, at least about 90%, at least about 91%, at least about 92%, at least about 93%, at least about 94%, at least about 95%, at least about 96%, at least about 97%, at least about 98%, at least about 99%, or 100% sequence identity to a reverse transcriptase domain of any one of SEQ ID NOs: 555-728, wherein the sequence is fused N- or C-terminally to a non-retrotransposase domain or an affinity tag. In some embodiments, the reverse transcriptase domain comprises a sequence having at least 80% sequence identity to any one of SEQ ID NOs: 555-560, 563, 564, 566, 567, 569, 572, 574, 580-582, 584-588, 592, 593, 596, 602, 604, 605, 608, 561, 562, 564, 565, 568, 571, 573, 576-579, 583, 590, 591, 594, 598, 601, 606, and 607. In some embodiments, the reverse transcriptase comprises a sequence having at least 80% sequence identity to any one of SEQ ID NOs: 555-560, 563, 564, 566, 567, 569, 572, 574, 580-582, 584-588, 592, 593, 596, 602, 604, 605, and 608. In some embodiments, the non-retrotransposase domain is an RNA-binding protein domain. In some embodiments, the RNA binding protein domain comprises a bacteriophage MS2 coat protein (MCP) domain. In some embodiments, the protein comprises a sequence having at least 80% sequence identity to any one of SEQ ID NOs: 30-32, 40-50, 740-756, and 757-760. In some embodiments, the reverse transcriptase domain comprises a sequence having at least 80% sequence identity to any one of SEQ ID NOs: 555-558, 561-567, 569, 570, and 575.

[0052] In some aspects, the present disclosure provides for a nucleic acid encoding an open reading frame, wherein the open reading frame encodes an RT or endonuclease domain having at least about 80%, at least about 81%, at least about 82%, at least about 83%, at least about 84%, at least about 85%, at least about 86%, at least about 87%, at least about 88%, at least about 89%, at least about 90%, at least about 91%, at least about 92%, at least about 93%, at least about 94%, at least about 95%, at least about 96%, at least about 97%, at least about 98%, at least about 99%, or 100% sequence identity to an RT or endonuclease domain of any one of SEQ ID NOs: 555-728, wherein: (a) the open reading frame is optimized for expression in an organism and the organism is different to the origin of the RT or endonuclease domain; or (b) the ORF comprises a sequence encoding an affinity tag. In some embodiments, the nucleic acid further encodes a retrotransposase comprising a sequence having at least 80% sequence identity to an RT or endonuclease domain of any one of SEQ ID NOs: 555-560, 563, 564, 566, 567, 569, 572, 574, 580-582, 584-588, 592, 593, 596, 602, 604, 605, 608, 561, 562, 564, 565, 568, 571, 573, 576-579, 583, 590, 591, 594, 598, 601, 606, and 607. In some embodiments, the reverse transcriptase comprises a sequence having at least 80% sequence identity to any one of SEQ ID NOs: 555-560, 563, 564, 566, 567, 569, 572, 574, 580-582, 584-588, 592, 593, 596, 602, 604, 605, and 608.

[0053] In some aspects, the present disclosure provides for a nucleic acid comprising a sequence comprising an open reading frame (ORF) comprising a sequence encoding a reverse transcriptase domain or a maturase domain having at least about 80%, at least about 81%, at least about 82%, at least about 83%, at least about 84%, at least about 85%, at least about 86%, at least about 87%, at least about 88%, at least about 89%, at least about 90%, at least about 91%, at least about 92%, at least about 93%, at least about 94%, at least about 95%, at least about 96%, at least about 97%, at least about 98%, at least about 99%, or 100% sequence identity to a reverse transcriptase domain or a maturase domain of any one of SEQ ID NOs: 729-733, wherein: (a) the open reading frame is optimized for expression in an organism and the organism is different to the origin of the RT or endonuclease domain; or (b) the ORF comprises a sequence encoding an affinity tag. In some embodiments, the ORF encodes a protein having at least 80% sequence identity to any one of SEQ ID NOs: 729-733. In some embodiments, the ORF is optimized for expression in the bacterial organism or wherein the organism is E. coli. In some embodiments, the ORF is optimized for expression in a mammalian organism or wherein the organism is a primate organism. In some embodiments, the primate organism is H. sapiens. In some embodiments, the ORF comprises an affinity tag operably linked to the sequence encoding the reverse transcriptase domain or the maturase domain, wherein the ORF has at least 80% sequence identity to any one of SEQ ID NOs: 298-302. In some embodiments, the ORF comprises a sequence having at least 80% sequence identity to any one of SEQ ID NOs: 303-307. In some embodiments, the reverse transcriptase domain or the maturase domain comprises a conserved Y[I/L]DD active site motif of any one of SEQ ID NOs: 729-733.

[0054] In some aspects, the present disclosure provides for a method for synthesizing complementary DNA (cDNA), comprising: (a) providing an RNA molecule as a template for cDNA synthesis; (b) providing a primer oligonucleotide to initiate cDNA synthesis from the RNA molecule; and (c) synthesizing cDNA initiated by the primer oligonucleotide from the template using a reverse transcriptase comprising a sequence having at least about 80%, at least about 81%, at least about 82%, at least about 83%, at least about 84%, at least about 85%, at least about 86%, at least about 87%, at least about 88%, at least about 89%, at least about 90%, at least about 91%, at least about 92%, at least about 93%, at least about 94%, at least about 95%, at least about 96%, at least about 97%, at least about 98%, at least about 99%, or 100% sequence identity to a reverse transcriptase domain of any one of SEQ ID NOs: 440-554. In some embodiments, the reverse transcriptase comprises a sequence having at least 80% sequence identity to any one of SEQ ID NOs: 518-522, 524-527, and 529-532. In some embodiments, the reverse transcriptase comprises a sequence having at least 80% sequence identity to any one of SEQ ID NOs: 526. In some embodiments, the primer oligonucleotide comprises an oligo (dT) sequence or a degenerate sequence of at least six oligonucleotides. In some embodiments, the synthesizing cDNA comprises incubating the template RNA molecule, the primer oligonucleotide, and the reverse transcriptase in a reaction mixture under conditions suitable for extension of a DNA sequence from the RNA template. In some embodiments, the reaction mixture further comprises dNTPs, a reaction buffer, divalent metal ions, Mg²⁺, or Mn²⁺.

[0055] In some aspects, the present disclosure provides for a polypeptide comprising a reverse transcriptase domain comprising a sequence having at least about 80%, at least about 81%, at least about 82%, at least about 83%, at least about 84%, at least about 85%, at least about 86%, at least about 87%, at least about 88%, at least about 89%, at least about 90%, at least about 91%, at least about 92%, at least about 93%, at least about 94%, at least about 95%, at least about 96%, at least about 97%, at least about 98%, at least about 99%, or 100% sequence identity to a reverse transcriptase domain of any one of SEQ ID NOs: 440-554, wherein the sequence is fused N- or C-terminally to a non-retrotransposase domain or an affinity tag. In some embodiments, the reverse transcriptase domain comprises a sequence having at least 80% sequence identity to any one of SEQ ID NOs: 518-522, 524-527, and 529-532. In some embodiments, the reverse transcriptase comprises a sequence having at least 80% sequence identity to SEQ ID NO: 526. In some embodiments, the non-retrotransposase domain is an RNA-binding protein domain. In some embodiments, the RNA binding protein domain comprises a bacteriophage MS2 coat protein (MCP) domain. In some embodiments, the sequence is fused N- or C-terminally to an affinity tag.

[0056] In some aspects, the present disclosure provides for a nucleic acid encoding an open reading frame, wherein the open reading frame encodes an RT domain having at least about 80%, at least about 81%, at least about 82%, at least about 83%, at least about 84%, at least about 85%, at least about 86%, at least about 87%, at least about 88%, at least about 89%, at least about 90%, at least about 91%, at least about 92%, at least about 93%, at least about 94%, at least about 95%, at least about 96%, at least about 97%, at least about 98%, at least about 99%, or 100% sequence identity to an RT domain of any one of SEQ ID NOs: 440-554, wherein: (a) the open reading frame is optimized for expression in an organism and the organism is different to the origin of the RT or endonuclease domain; or (b) the ORF comprises a sequence encoding an affinity tag. In some embodiments, the nucleic acid further encodes an RT having at least 80% sequence identity to any one of SEQ ID NOs: 518-522, 524-527, and 529-532. In some embodiments, the reverse transcriptase comprises a sequence having at least 80% sequence identity to SEQ ID NOs: 526. In some embodiments, the open reading frame comprises a sequence having at least 80% sequence identity to any one of SEQ ID NOs: 356-373.

[0057] In some aspects, the present disclosure provides for a method for synthesizing complementary DNA (cDNA), comprising: (a) providing an RNA molecule as a template for cDNA synthesis; (b) providing a primer oligonucleotide to initiate cDNA synthesis from the RNA molecule; and (c) synthesizing cDNA initiated by the primer oligonucleotide from the template using a reverse transcriptase comprising a sequence having at least about 80%, at least about 81%, at least about 82%, at least about 83%, at least about 84%, at least about 85%, at least about 86%, at least about 87%, at least about 88%, at least about 89%, at least about 90%, at least about 91%, at least about 92%, at least about 93%, at least about 94%, at least about 95%, at least about 96%, at least about 97%, at least about 98%, at least about 99%, or 100% sequence identity to a reverse transcriptase domain of any one of SEQ ID NOs: 609-610, 611-615, 616-617, 618-622, 623, 624-626, 627-673, 1544-1545, and 1555. In some embodiments, the reverse transcriptase domain comprises a conserved xxDD, [F/Y]XDD, NAxxH, or VTG motif of any one of SEQ ID NOs: 609-610, 611-615, 616-617, 618-622, 623, 624-626, 627-673, 1544-1545, and 1555. In some embodiments, the reverse transcriptase comprises a sequence having at least 80% sequence identity to any one of SEQ ID NOs: 612-613, 616-619, 622, 624, 627-630, and 633. In some embodiments, the primer oligonucleotide comprises an oligo (dT) sequence or a degenerate sequence of at least six oligonucleotides. In some embodiments, the primer oligonucleotide comprises at least six consecutive nucleotides having at least 80% sequence identity to any one of SEQ ID NOs: 340-355, 1582-1594, and 1842-1849. In some embodiments, the synthesizing cDNA comprises incubating the template RNA molecule, the primer oligonucleotide, and the reverse transcriptase in a reaction mixture under conditions suitable for extension of a DNA sequence from the RNA template. In some embodiments, the reaction mixture further comprises dNTPs, a reaction buffer, divalent metal ions, Mg²⁺, or Mn²⁺.

[0058] In some aspects, the present disclosure provides for a polypeptide comprising a reverse transcriptase domain comprising a sequence having at least about 80%, at least about 81%, at least about 82%, at least about 83%, at least about 84%, at least about 85%, at least about 86%, at least about 87%, at least about 88%, at least about 89%, at least about 90%, at least about 91%, at least about 92%, at least about 93%, at least about 94%, at least about 95%, at least about 96%, at least about 97%, at least about 98%, at least about 99%, or 100% sequence identity to a reverse transcriptase domain of any one of SEQ ID NOs: 609-610, 611-615, 616-617, 618-622, 623, 624-626, 627-673, 1544-1545, 1555, wherein the sequence is fused N- or C-terminally to a non-retrotransposase domain or affinity tag. In some embodiments, the reverse transcriptase domain comprises a conserved xxDD, [F/Y]XDD, NAxxH, or VTG motif of any one of SEQ ID NOs: 609-610, 611-615, 616-617, 618-622, 623, 624-626, 627-673, 1544-1545, and 1555. In some embodiments, the reverse transcriptase domain comprises a sequence having at least 80% sequence identity to any one of SEQ ID NOs: 612-613, 616-619, 622, 624, 627-630, and 633. In some embodiments, the non-retrotransposase domain is an RNA-binding protein domain. In some embodiments, the RNA binding protein domain comprises a bacteriophage MS2 coat protein (MCP) domain. In some embodiments, the sequence is fused N- or C-terminally to an affinity tag.

[0059] In some aspects, the present disclosure provides for a nucleic acid encoding an open reading frame (ORF) optimized for expression in an organism, wherein the open reading frame encodes an RT domain having at least about 80%, at least about 81%, at least about 82%, at least about 83%, at least about 84%, at least about 85%, at least about 86%, at least about 87%, at least about 88%, at least about 89%, at least about 90%, at least about 91%, at least about 92%, at least about 93%, at least about 94%, at least about 95%, at least about 96%, at least about 97%, at least about 98%, at least about 99%, or 100% sequence identity to an RT domain of any one of SEQ ID NOs: 609-610, 611-615, 616-617, 618-622, 623, 624-626, 627-673, 1544-1545, and 1555, wherein: (a) the open reading frame is optimized for expression in an organism and the organism is different to the origin of the RT or endonuclease domain; or (b) the ORF comprises a sequence encoding an affinity tag. In some embodiments, the reverse transcriptase domain comprises a conserved xxDD, [F/Y]XDD, NAxxH, or VTG motif of any one of SEQ ID NOs: 609-610, 611-615, 616-617, 618-622, 623, 624-626, 627-673, 1544-1545, or 1555. In some embodiments, the nucleic acid further encodes an RT having at least 80% sequence identity to any one of SEQ ID NOs: 612-613, 616-619, 622, 624, 627-630, and 633. In some embodiments, the ORF comprises a sequence encoding an affinity tag. In some embodiments, the open reading frame comprises a sequence having at least 80% sequence identity to any one of SEQ ID NOs: 66-119, 174-180, 188-192, 198-202, 208-216, 226-230, 236-240, 246-250, 308-309, 310-312, 313-314, 315-319, 320, 321-323, 363-373, 1569-1570, 1571-1580, and 1581. In some embodiments, the organism is different to the origin of the RT domain. In some embodiments, the ORF comprises a sequence having at least 80% sequence identity to any one of SEQ ID NOs: 120-173, 181-187, 193-197, 203-207, 217-225, 231-235, 241-245, 251-255, 267-277, 288-297, 303-307, 324-339, 964-981, 1003-1019, 1504-1520, 1521-1536, 1539-1543, 1556-1568, and 1611-1806.

[0060] In some aspects, the present disclosure provides for a synthetic oligonucleotide comprising at least six consecutive nucleotides having at least about 80%, at least about 81%, at least about 82%, at least about 83%, at least about 84%, at least about 85%, at least about 86%, at least about 87%, at least about 88%, at least about 89%, at least about 90%, at least about 91%, at least about 92%, at least about 93%, at least about 94%, at least about 95%, at least about 96%, at least about 97%, at least about 98%, at least about 99%, or 100% sequence identity to any one of SEQ ID NOs: 340-355, 1582-1594, and 1842-1849. In some embodiments, the synthetic oligonucleotide comprises DNA nucleotides. In some embodiments, the oligonucleotide further comprises at least one phosphorothioate linkage.

[0061] In some aspects, the present disclosure provides for a vector comprising a sequence having at least about 80%, at least about 81%, at least about 82%, at least about 83%, at least about 84%, at least about 85%, at least about 86%, at least about 87%, at least about 88%, at least about 89%, at least about 90%, at least about 91%, at least about 92%, at least about 93%, at least about 94%, at least about 95%, at least about 96%, at least about 97%, at least about 98%, at least about 99%, or 100% sequence identity to any one of SEQ ID NOs: 340-355, 1582-1594, and 1842-1849.

[0062] In some aspects, the present disclosure provides for a vector comprising any of the nucleic acids described herein.

[0063] In some aspects, the present disclosure provides for a host cell comprising any of the nucleic acids described herein. In some embodiments, the host cell is an E. coli cell. In some embodiments, the E. coli cell is a λDE3 lysogen or the E. coli cell is a BL21 (DE3) strain. In some embodiments, the E. coli cell has an ompT lon genotype. In some embodiments, the nucleic acid comprises an open reading from (ORF) encoding a retrotransposase, a fragment thereof, or a reverse transcriptase domain, wherein the open reading frame is operably linked to a T7 promoter sequence, a T7-lac promoter sequence, a lac promoter sequence, a tac promoter sequence, a trc promoter sequence, a ParaBAD promoter sequence, a PrhaBAD promoter sequence, a T5 promoter sequence, a cspA promoter sequence, an araP_{BAD} promoter, a strong leftward promoter from phage lambda (pL promoter), or any combination thereof. In some embodiments, the open reading frame comprises a sequence encoding an affinity tag linked in-frame to a sequence encoding the retrotransposase, the fragment thereof, or the reverse transcriptase domain.

[0064] In some aspects, the present disclosure provides for a culture comprising any of the host cells described herein in compatible liquid medium.

[0065] In some aspects, the present disclosure provides for a method of producing a retrotransposase, a fragment thereof, or a reverse transcriptase domain comprising cultivating any of the host cells described herein in compatible liquid medium. In some embodiments, the method further comprises inducing expression of the retrotransposase, the fragment thereof, or the reverse transcriptase domain by addition of an additional chemical agent or an increased amount of a nutrient. In some embodiments, the additional chemical agent or increased amount of a nutrient comprises Isopropyl β-D-1-thiogalactopyranoside (IPTG) or additional amounts of lactose. In some embodiments, the method further comprises isolating the host cell after the cultivation and lysing the host cell to produce a protein extract. In some embodiments, the method further comprises subjecting the protein extract to affinity chromatography specific to an affinity tag or ion-affinity chromatography.

[0066] In some aspects, the present disclosure provides for an in vitro transcribed mRNA comprising an RNA cognate of any the nucleic acids described herein.

[0067] In some aspects, the present disclosure provides for an engineered retrotransposase system, comprising: (a) a double-stranded nucleic acid comprising a cargo nucleotide sequence, wherein the cargo nucleotide sequence is configured to interact with a retrotransposase; and (b) a retrotransposase, wherein: (i) the retrotransposase is configured to transpose the cargo nucleotide sequence to a target nucleic acid locus; and (ii) the retrotransposase is derived from an uncultivated microorganism. In some embodiments, the cargo nucleotide sequence is engineered. In some embodiments, the cargo nucleotide sequence is heterologous. In some embodiments, the cargo nucleotide sequence does not have the sequence of a wild-type genome sequence present in an organism. In some embodiments, the retrotransposase comprises a sequence having at least 75% sequence identity to any one of SEQ ID NOs: 1-29, 393-735, 799-895, 1020-1476, 1544-1554, 1850-2160, 2165-2210, and 2258-2266. In some embodiments, the retrotransposase comprises a reverse transcriptase domain. In some embodiments, the retrotransposase further comprises one or more zinc finger domains. In some embodiments, the retrotransposase further comprises an endonuclease domain. In some embodiments, the retrotransposase has less than 80% sequence identity to a documented retrotransposase. In some embodiments, the cargo nucleotide sequence is flanked by a 3′ untranslated region (UTR) and a 5′ untranslated region (UTR). In some embodiments, the retrotransposase is configured to transpose the cargo nucleotide sequence via a ribonucleic acid polynucleotide intermediate. In some embodiments, the retrotransposase comprises one or more nuclear localization sequences (NLSs) proximal to an N- or C-terminus of the retrotransposase. In some embodiments, the NLS comprises a sequence at least 80% identical to a sequence selected from the group consisting of SEQ ID NO: 1477-1492. In some embodiments, the sequence identity is determined by a BLASTP, CLUSTALW, MUSCLE, MAFFT, or CLUSTALW with the parameters of the Smith-Waterman homology search algorithm. In some embodiments, the sequence identity is determined by the BLASTP homology search algorithm using parameters of a wordlength (W) of 3, an expectation (E) of 10, and a BLOSUM62 scoring matrix setting gap costs at existence of 11, extension of 1, and using a conditional compositional score matrix adjustment.

[0068] In some aspects, the present disclosure provides for an engineered retrotransposase system, comprising: (a) a double-stranded nucleic acid comprising a cargo nucleotide sequence, wherein the cargo nucleotide sequence is configured to interact with a retrotransposase; and (b) a retrotransposase, wherein: (i) the retrotransposase is configured to transpose the cargo nucleotide sequence to a target nucleic acid locus; and (ii) the retrotransposase comprises a sequence having at least 75% sequence identity to any one of SEQ ID NOs: 1-29, 393-735, 799-895, 1020-1476, 1544-1554, 1850-2160, 2165-2210, and 2258-2266. In some embodiments, the retrotransposase is derived from an uncultivated microorganism. In some embodiments, the retrotransposase comprises a reverse transcriptase domain. In some embodiments, the retrotransposase further comprises one or more zinc finger domains. In some embodiments, the retrotransposase further comprises an endonuclease domain. In some embodiments, the retrotransposase has less than 80% sequence identity to a documented retrotransposase. In some embodiments, the cargo nucleotide sequence is flanked by a 3′ untranslated region (UTR) and a 5′ untranslated region (UTR). In some embodiments, the retrotransposase is configured to transpose the cargo nucleotide sequence via a ribonucleic acid polynucleotide intermediate. In some embodiments, the sequence identity is determined by a BLASTP, CLUSTALW, MUSCLE, MAFFT, or CLUSTALW with the parameters of the Smith-Waterman homology search algorithm. In some embodiments, the sequence identity is determined by the BLASTP homology search algorithm using parameters of a wordlength (W) of 3, an expectation (E) of 10, and a BLOSUM62 scoring matrix setting gap costs at existence of 11, extension of 1, and using a conditional compositional score matrix adjustment.

[0069] In some aspects, the present disclosure provides for a deoxyribonucleic acid polynucleotide encoding the engineered retrotransposase system of any one of the aspects or embodiments described herein.

[0070] In some aspects, the present disclosure provides for a nucleic acid comprising an engineered nucleic acid sequence optimized for expression in an organism, wherein the nucleic acid encodes a retrotransposase, and wherein the retrotransposase is derived from an uncultivated microorganism, wherein the organism is not the uncultivated microorganism. In some embodiments, the retrotransposase comprises at least 75% sequence identity to any one of SEQ ID NOs: 1-29, 393-735, 799-895, 1020-1476 and 1546-1553. In some embodiments, the retrotransposase comprises a sequence encoding one or more nuclear localization sequences (NLSs) proximal to an N- or C-terminus of the retrotransposase. In some embodiments, the NLS comprises a sequence selected from SEQ ID NOs: 1477-1492. In some embodiments, the NLS comprises SEQ ID NO: 1478. In some embodiments, the NLS is proximal to the N-terminus of the retrotransposase. In some embodiments, the NLS comprises SEQ ID NO: 1477. In some embodiments, the NLS is proximal to the C-terminus of the retrotransposase. In some embodiments, the organism is prokaryotic, bacterial, eukaryotic, fungal, plant, mammalian, rodent, or human

[0071] In some aspects, the present disclosure provides for a vector comprising the nucleic acid of any one of the aspects or embodiments described herein. In some embodiments, the vector further comprises a nucleic acid encoding a cargo nucleotide sequence configured to form a complex with the retrotransposase. In some embodiments, the vector is a plasmid, a minicircle, a CELiD, an adeno-associated virus (AAV) derived virion, or a lentivirus.

[0072] In some aspects, the present disclosure provides for a cell comprising the vector of any one of any one of the aspects or embodiments described herein.

[0073] In some aspects, the present disclosure provides for a method of manufacturing a retrotransposase, comprising cultivating the cell of any of the aspects or embodiments described herein.

[0074] In some aspects, the present disclosure provides for a method for binding, nicking, cleaving, marking, modifying, or transposing a double-stranded deoxyribonucleic acid polynucleotide, comprising: (a) contacting the double-stranded deoxyribonucleic acid polynucleotide with a retrotransposase configured to transpose the cargo nucleotide sequence to a target nucleic acid locus; wherein the retrotransposase comprises a sequence having at least 75% sequence identity to any one of SEQ ID NOs: 1-29, 393-735, 799-895, 1020-1476, 1544-1554, 1850-2160, 2165-2210, and 2258-2266. In some embodiments, the retrotransposase is derived from an uncultivated microorganism. In some embodiments, the retrotransposase comprises a reverse transcriptase domain. In some embodiments, the retrotransposase further comprises one or more zinc finger domains. In some embodiments, the retrotransposase further comprises an endonuclease domain. In some embodiments, the retrotransposase has less than 80% sequence identity to a documented retrotransposase. In some embodiments, the cargo nucleotide sequence is flanked by a 3′ untranslated region (UTR) and a 5′ untranslated region (UTR). In some embodiments, the double-stranded deoxyribonucleic acid polynucleotide is transposed via a ribonucleic acid polynucleotide intermediate. In some embodiments, the double-stranded deoxyribonucleic acid polynucleotide is a eukaryotic, plant, fungal, mammalian, rodent, or human double-stranded deoxyribonucleic acid polynucleotide.

[0075] In some aspects, the present disclosure provides for a method of modifying a target nucleic acid locus, the method comprising delivering to the target nucleic acid locus the engineered retrotransposase system of any one of the aspects or embodiments described herein, wherein the retrotransposase is configured to transpose the cargo nucleotide sequence to the target nucleic acid locus, and wherein the complex is configured such that upon binding of the complex to the target nucleic acid locus, the complex modifies the target nucleic acid locus In some embodiments, modifying the target nucleic acid locus comprises binding, nicking, cleaving, marking, modifying, or transposing the target nucleic acid locus. In some embodiments, the target nucleic acid locus comprises deoxyribonucleic acid (DNA). In some embodiments, the target nucleic acid locus comprises genomic DNA, viral DNA, or bacterial DNA. In some embodiments, the target nucleic acid locus is in vitro. In some embodiments, the target nucleic acid locus is within a cell. In some embodiments, the cell is a prokaryotic cell, a bacterial cell, a eukaryotic cell, a fungal cell, a plant cell, an animal cell, a mammalian cell, a rodent cell, a primate cell, a human cell, or a primary cell. In some embodiments, the cell is a primary cell. In some embodiments, the primary cell is a T cell. In some embodiments, the primary cell is a hematopoietic stem cell (HSC).

[0076] In some aspects, the present disclosure provides for a method of any one of the aspects or embodiments described herein, wherein delivering the engineered retrotransposase system to the target nucleic acid locus comprises delivering the nucleic acid of any one of the aspects or embodiments described herein or the vector of any of the aspects or embodiments described herein. In some embodiments, delivering the engineered retrotransposase system to the target nucleic acid locus comprises delivering a nucleic acid comprising an open reading frame encoding the retrotransposase. In some embodiments, the nucleic acid comprises a promoter to which the open reading frame encoding the retrotransposase is operably linked. In some embodiments, delivering the engineered retrotransposase system to the target nucleic acid locus comprises delivering a capped mRNA containing the open reading frame encoding the retrotransposase. In some embodiments, delivering the engineered retrotransposase system to the target nucleic acid locus comprises delivering a translated polypeptide. In some embodiments, the retrotransposase does not induce a break at or proximal to the target nucleic acid locus.

[0077] In some aspects, the present disclosure provides for a host cell comprising an open reading frame encoding a heterologous retrotransposase having at least 75% sequence identity to any one of SEQ ID NOs: 1-29, 393-735, 799-895, 1020-1476, 1544-1554, 1850-2160, 2165-2210, and 2258-2266. In some embodiments, the host cell is an E. coli cell. In some embodiments, the E. coli cell is a λDE3 lysogen or the E. coli cell is a BL21 (DE3) strain. In some embodiments, the E. coli cell has an ompT lon genotype. In some embodiments, the open reading frame is operably linked to a T7 promoter sequence, a T7-lac promoter sequence, a lac promoter sequence, a tac promoter sequence, a tre promoter sequence, a ParaBAD promoter sequence, a PrhaBAD promoter sequence, a T5 promoter sequence, a cspA promoter sequence, an araP_{BAD} promoter, a strong leftward promoter from phage lambda (pL promoter), or any combination thereof. In some embodiments, the open reading frame comprises a sequence encoding an affinity tag linked in-frame to a sequence encoding the retrotransposase. In some embodiments, the affinity tag is an immobilized metal affinity chromatography (IMAC) tag. In some embodiments, the IMAC tag is a polyhistidine tag. In some embodiments, the affinity tag is a myc tag, a human influenza hemagglutinin (HA) tag, a maltose binding protein (MBP) tag, a glutathione S-transferase (GST) tag, a streptavidin tag, a FLAG tag, or any combination thereof. In some embodiments, the affinity tag is linked in-frame to the sequence encoding the retrotransposase via a linker sequence encoding a protease cleavage site. In some embodiments, the protease cleavage site is a tobacco etch virus (TEV) protease cleavage site, a PreScission® protease cleavage site, a Thrombin cleavage site, a Factor Xa cleavage site, an enterokinase cleavage site, or any combination thereof. In some embodiments, the open reading frame is codon-optimized for expression in the host cell. In some embodiments, the open reading frame is provided on a vector. In some embodiments, the open reading frame is integrated into a genome of the host cell

[0078] In some aspects, the present disclosure provides for a culture comprising the host cell of any one of the aspects or embodiments described herein in compatible liquid medium.

[0079] In some aspects, the present disclosure provides for a method of producing a retrotransposase, comprising cultivating the host cell of any one of the aspects or embodiments described herein in compatible growth medium. In some embodiments, the method further comprises inducing expression of the retrotransposase by addition of an additional chemical agent or an increased amount of a nutrient. In some embodiments, the additional chemical agent or increased amount of a nutrient comprises Isopropyl β-D-1-thiogalactopyranoside (IPTG) or additional amounts of lactose. In some embodiments, the method further comprising isolating the host cell after the cultivation and lysing the host cell to produce a protein extract. In some embodiments, the method further comprises subjecting the protein extract to IMAC, or ion-affinity chromatography. In some embodiments, the open reading frame comprises a sequence encoding an IMAC affinity tag linked in-frame to a sequence encoding the retrotransposase. In some embodiments, the IMAC affinity tag is linked in-frame to the sequence encoding the retrotransposase via a linker sequence encoding protease cleavage site. In some embodiments, the protease cleavage site comprises a tobacco etch virus (TEV) protease cleavage site, a PreScission® protease cleavage site, a Thrombin cleavage site, a Factor Xa cleavage site, an enterokinase cleavage site, or any combination thereof. In some embodiments, the IMAC affinity tag by contacting a protease corresponding to the protease cleavage site to the retrotransposase. In some embodiments, the method further comprises performing subtractive IMAC affinity chromatography to remove the affinity tag from a composition comprising the retrotransposase.

[0080] In some aspects, the present disclosure provides for a method of disrupting a locus in a cell, comprising contacting to the cell a composition comprising: (a) a double-stranded nucleic acid comprising a cargo nucleotide sequence, wherein the cargo nucleotide sequence is configured to interact with a retrotransposase; and (b) a retrotransposase, wherein: (i) the retrotransposase is configured to transpose the cargo nucleotide sequence to a target nucleic acid locus; (ii) the retrotransposase comprises a sequence having at least 75% sequence identity to any one of SEQ ID NOs: 1-29, 393-735, 799-895, 1020-1476, 1544-1554, 1850-2160, 2165-2210, and 2258-2266; and (iii) the retrotransposase has at least equivalent transposition activity to a documented retrotransposase in a cell. In some embodiments, the transposition activity is measured in vitro by introducing the retrotransposase to cells comprising the target nucleic acid locus and detecting transposition of the target nucleic acid locus in the cells. In some embodiments, the composition comprises 20 pmoles or less of the retrotransposase. In some embodiments, the composition comprises 1 μmol or less of the retrotransposase.

[0081] In some aspects, the present disclosure provides for a host cell comprising an open reading frame encoding any of the proteins or polypeptides described herein. In some embodiments, the host cell is an E. coli cell or a mammalian cell. In some embodiments, the host cell is an E. coli cell, wherein the E. coli cell is a λDE3 lysogen or the E. coli cell is a BL21 (DE3) strain. In some embodiments, the E. coli cell has an ompT lon genotype. In some embodiments, the open reading frame is operably linked to a T7 promoter sequence, a T7-lac promoter sequence, a lac promoter sequence, a tac promoter sequence, a tre promoter sequence, a ParaBAD promoter sequence, a PrhaBAD promoter sequence, a T5 promoter sequence, a cspA promoter sequence, an araP_{BAD} promoter, a strong leftward promoter from phage lambda (pL promoter), or any combination thereof. In some embodiments, the open reading frame comprises a sequence encoding an affinity tag linked in-frame to a sequence encoding the protein. In some embodiments, the affinity tag is an immobilized metal affinity chromatography (IMAC) tag. In some embodiments, the IMAC tag is a polyhistidine tag. In some embodiments, the affinity tag is a myc tag, a human influenza hemagglutinin (HA) tag, a maltose binding protein (MBP) tag, a glutathione S-transferase (GST) tag, a streptavidin tag, a strep tag, a FLAG tag, or any combination thereof. In some embodiments, the affinity tag is linked in-frame to the sequence encoding the protein via a linker sequence encoding a protease cleavage site. In some embodiments, the protease cleavage site is a tobacco etch virus (TEV) protease cleavage site, a PreScission® protease cleavage site, a Thrombin cleavage site, a Factor Xa cleavage site, an enterokinase cleavage site, or any combination thereof. In some embodiments, the open reading frame is codon-optimized for expression in the host cell. In some embodiments, the open reading frame is provided on a vector. In some embodiments, the open reading frame is integrated into a genome of the host cell.

[0082] In some aspects, the present disclosure provides for a culture comprising any of the host cells described herein in compatible liquid medium.

[0083] In some aspects, the present disclosure provides for a method of producing any of the proteins described herein, comprising cultivating any of the host cells described herein encoding any of the proteins described herein in compatible growth medium. In some embodiments, the method further comprises inducing expression of the protein. In some embodiments, the inducing expression of the nuclease is by addition of an additional chemical agent or an increased amount of a nutrient, or by temperature increase or decrease. In some embodiments, an additional chemical agent or an increased amount of a nutrient comprises Isopropyl β-D-1-thiogalactopyranoside (IPTG) or additional amounts of lactose. In some embodiments, the method further comprises isolating the host cell after the cultivation and lysing the host cell to produce a protein extract comprising the protein. In some embodiments, the method further comprises isolating the protein. In some embodiments, the isolating comprises subjecting the protein extract to IMAC, ion-exchange chromatography, anion exchange chromatography, or cation exchange chromatography. In some embodiments, the host cell comprises a nucleic acid comprising an open reading frame comprising a sequence encoding an affinity tag linked in-frame to a sequence encoding the protein. In some embodiments, the affinity tag is linked in-frame to the sequence encoding the protein via a linker sequence encoding a protease cleavage site. In some embodiments, the protease cleavage site comprises a tobacco etch virus (TEV) protease cleavage site, a PreScission® protease cleavage site, a Thrombin cleavage site, a Factor Xa cleavage site, an enterokinase cleavage site, or any combination thereof. In some embodiments, the method further comprises cleaving the affinity tag by contacting a protease corresponding to the protease cleavage site to the protein. In some embodiments, the affinity tag is an IMAC affinity tag. In some embodiments, the method further comprises performing subtractive IMAC affinity chromatography to remove the affinity tag from a composition comprising the protein.

[0084] Additional aspects and advantages of the present disclosure will become readily apparent to those skilled in this art from the following detailed description, wherein only illustrative embodiments of the present disclosure are shown and described. As will be realized, the present disclosure is capable of other and different embodiments, and its several details are capable of modifications in various obvious respects, all without departing from the disclosure. Accordingly, the drawings and description are to be regarded as illustrative in nature, and not as restrictive.

### BRIEF DESCRIPTION OF THE DRAWINGS

[0085] The novel features of the disclosure are set forth with particularity in the appended claims. A better understanding of the features and advantages of the present disclosure will be obtained by reference to the following detailed description that sets forth illustrative embodiments, in which the principles of the disclosure are utilized, and the accompanying drawings of which:

[0086] FIG. 1 depicts the genomic context of a bacterial retrotransposon. MG140-1 is a predicted retrotransposase (arrow) encoding a Zn-finger DNA binding domain and a reverse transcriptase domain. Regions flanking the retrotransposase display secondary structure that possibly represent binding sites for the retrotransposase (Secondary structure boxes and zoomed images). Regions of similarity with other homologs indicate putative target sites at which the retrotransposon integrated.

[0087] FIG. 2 depicts microbial MG retrotransposases (thick black branches on clade 4) are more closely related to Eukaryotic than viral retrotransposases (thin black branches on clade 6). Clade 1: Telomerase reverse transcriptases; clade 2: Group II intron reverse transcriptases; clade 3: Eukaryotic R1 type retrotransposases; clade 4: microbial and Eukaryotic R2 retrotransposases; clade 5: Eukaryotic retrovirus-related reverse transcriptases; and clade 6: viral reverse transcriptases.

[0088] FIG. 3 depicts Clades 3 and 4 from the phylogenetic gene tree from FIG. 2. Some microbial MG retrotransposases contain multiple Zn-finger motifs (vertical rectangles), the conserved RVT_1 reverse transcriptase domain, and APE/RLE or other endonuclease domains (top and bottom panel). Some microbial MG retrotransposases lack an endonuclease domain (mid-panel).

[0089] FIG. 4 depicts a phylogenetic tree inferred from a multiple sequence alignment of the reverse transcriptase domain from diverse enzymes. RT sequences were derived from DNA, as well as RNA assemblies. Reference RTs were included in the tree for classification purposes.

[0090] FIG. 5A depicts a phylogenetic tree inferred from a multiple sequence alignment of RT domains identified from families of non-LTR retrotransposases (MG140, MG146 and MG147) and related RTs (MG148).

[0091] FIG. 5B depicts data demonstrating that non-LTR retrotransposases (MG140, MG146 and MG147) contain an RT domain, an endonuclease domain (Endo), and multiple zinc-binding ribbon motifs, while family MG148 RTs lack an endonuclease domain.

[0092] FIG. 6A depicts data demonstrating that MG140 R2 retrotransposases contain RT and endonuclease (EN) domains, as well as multiple zinc-fingers, and share between 24% and 26% average amino acid identity (AAI) with the reference Danio rerio R2 retrotransposase (R2Dr).

[0093] FIG. 6B depicts data demonstrating that the MG140-47 R2 retrotransposon integrates into 28S rRNA gene. Alignment of the MG140-47 contig to a reference (GQ398061) ribosomal RNA operon shows a large gap in the reference 28S rDNA gene due to integration of the R2 element into the MG140-47 28S rDNA gene (dotted box).

[0094] FIG. 7 depicts genomic context of the MG145-45 retrotransposon. The enzyme contains RT and Zinc-finger domains. A partial 18S rDNA gene hit at the 5′ end and poly-A tail at the 3′ end likely delineate the boundaries of the transposon.

[0095] FIG. 8A depicts the contig encoding the MG146-1 retrotransposase with RT and endonuclease domains.

[0096] FIG. 8B depicts the MG140-17-R2 retrotransposon encoding three genes predicted to be involved in mobilization: RNA recognition motif gene (RRM); endonuclease enzyme; and reverse transcriptase with RT and RNAse H domains.

[0097] FIG. 9A depicts genomic context of two members of the MG148 family of RTs. Predicted genes not associated with the RT are displayed as white arrows.

[0098] FIG. 9B depicts nucleotide sequence alignment of five members of the MG148 family indicating conserved regions (boxes underneath the sequence) upstream of the RT (arrow annotated over the consensus sequence).

[0099] FIG. 10 depicts screening of in vitro activity of RTns family of enzymes by qPCR (MG140). Activity was detected by qPCR using primers that amplify the full-length cDNA product derived from a primer extension reaction containing the respective RT. Samples are derived from RT reactions containing 100 nM substrate. Negative control: no-template water control in the in vitro expression reaction; positive control 1: R2Tg (Taeniopygia guttata); positive control 2: R2Bm (Bombyx mori). The two positive controls are documented R2 retrotransposons. Active candidates, defined as at least 10-fold signal above the negative control, are marked by hatched bars while candidates inactive in these conditions are white bars.

[0100] FIG. 11 depicts screening of in vitro activity of RTns family of enzymes by qPCR (MG146, MG147, MG148). Activity was detected by qPCR using primers that amplify the full-length cDNA product derived from a primer extension reaction containing the respective RT. Samples are derived from RT reactions containing 100 nM substrate. Negative control: no-template water control in the in vitro expression reaction; positive control 1: R2Tg (Taeniopygia guttata), a documented R2 retrotransposon. Active candidates, defined as at least 10-fold signal above the negative control, are marked by hatched bars while candidates inactive in these conditions are white bars.

[0101] FIG. 12 depicts an assay to assess the fidelity of R2 and R2-like candidates by next generation sequencing. The resulting cDNA product from a primer extension reaction was PCR-amplified and library prepped for NGS. Trimmed reads were aligned to the reference sequence and the frequency of misincorporation was calculated. Background: no-template water control in the in vitro expression reaction; positive control 1: R2Tg (Taeniopygia guttata).

[0102] FIG. 13A depicts a phylogenetic tree inferred from a multiple sequence alignment of full-length Group II intron RTs identified from families from diverse classes.

[0103] FIG. 13B depicts a summary table of MG families of Group II introns. AAI: average pairwise amino acid identity of MG families to reference Group II intron sequences.

[0104] FIGS. 14A-14D depict screening of in vitro activity of GII intron Class C candidates MG153-1 through MG153-21 and MG153-25 through MG153-27 by primer extension assay. For FIG. 14A through FIG. 14C, lane numbers correspond to the following: 1-PURExpress (in vitro expression) no template control, 2-MMLV control RT, 3-TGIRT-III control RT, 4-MarathonRT control RT. Numbering in bold corresponds to gel lanes with active candidates. Results are representative of two independent experiments. FIG. 14A lane numbers 5-14 correspond to candidates MG153-1 through MG153-10. FIG. 14B lane numbers 5-14 correspond to candidates MG153-11 through MG153-20. FIG. 14C lane numbers 5-8 correspond to candidates MG153-21, MG153-25, MG153-26, and MG153-27, respectively. FIG. 14D depicts detection of full-length cDNA production by qPCR. Hatched bars correspond to RTs that generate product at least 10-fold above background. Results were determined from two technical replicates. Arrows in FIG. 14A through FIG. 14C indicate full-length cDNA product (arrow near the top of the gel) and examples of cDNA drop off (lower arrows).

[0105] FIGS. 15A-15D depict screening of in vitro activity of GII intron Class C candidates MG153-28 through MG153-37 and MG153-39 through MG153-57 by primer extension assay. For FIG. 15A through FIG. 15C, lane numbers correspond to the following: 1-PURExpress (in vitro expression) no template control, 2-MMLV control RT, 3-TGIRT-III control RT. Numbering in bold corresponds to gel lanes. FIG. 15A lane numbers 4-13 correspond to candidates MG153-28 through MG153-37. FIG. 15B lane numbers 4-13 correspond to candidates MG153-39 through MG153-48. FIG. 15C lane numbers 4-13 correspond to candidates MG153-49 through MG153-57. FIG. 15D depicts detection of full-length cDNA production by qPCR. Hatched bars correspond to RTs that generate product at least 10-fold above background. Results were determined from two technical replicates. Arrows in FIG. 15A through FIG. 15C indicate full-length cDNA product (arrow near the top of the gel) and examples of cDNA drop off (lower arrows).

[0106] FIGS. 16A-16B depict screening of in vitro activity of GII intron Class D MG165 family of reverse transcriptases by primer extension assay. For FIG. 16A, lane numbers correspond to the following: 1-PURExpress (in vitro expression) no template control, 2-MMLV control RT, 3-TGIRT-III control RT, 4 through 12-candidates MG165-1 through 9. Numbering in bold corresponds to gel lanes with active candidates. FIG. 16B depicts quantification of full-length cDNA production by qPCR. Hatched bars correspond to RTs that generate product at least 10-fold above background. Results were determined from two technical replicates. Arrows in FIG. 16A indicate full-length cDNA product (arrow near the top of the gel) and examples of cDNA drop off (lower arrows).

[0107] FIGS. 17A-17B depict screening of in vitro activity of GII intron Class F MG167 family of reverse transcriptases by primer extension assay. For FIG. 17A, lane numbers correspond to the following: 1-PURExpress (in vitro expression) no template control, 2-MMLV control RT, 3-TGIRT-III control RT, 4 through 8 MG167-1 candidates. Numbering in bold corresponds to gel lanes with active candidates. FIG. 17B depicts quantification of full-length cDNA production by qPCR. Hatched bars correspond to RTs that generate product at least 10-fold above background. Results were determined from two technical replicates. Arrows in FIG. 17A indicate full-length cDNA product (arrow near the top of the gel) and examples of cDNA drop off (lower arrows).

[0108] FIG. 18 depicts an assay to assess the fidelity of GII intron Class C RT candidates from the MG153 family by next generation sequencing. The resulting cDNA product from a primer extension reaction was PCR-amplified and library prepped for NGS. Trimmed reads were aligned to the reference sequence and the frequency of misincorporation was calculated. Results were determined from two independent experiments.

[0109] FIGS. 19A-19C depict screening to assess the ability of indicated control RTs and GII intron Class C candidates to synthesize cDNA in mammalian cells. FIG. 19A depicts detection of 542 bp (top) and 100 bp (bottom) PCR products by agarose gel analysis. FIG. 19B depicts detection of 542 bp (top) and 100 bp (bottom) PCR products by D1000 TapeStation. FIG. 19C depicts detection of 542 bp PCR products by D1000 TapeStation for additional candidates. Lanes not relevant for the described experiment in FIG. 19A and FIG. 19B are covered by white boxes.

[0110] FIG. 20A depicts a phylogenetic tree of full-length G2L4-like RTs. Reference G2L4 sequences and MG172 candidates (dots) are highlighted.

[0111] FIG. 20B depicts data demonstrating that columns 277 to 280 of reference and MG172 RTs represent the catalytic residues responsible for reverse transcriptase function.

[0112] FIG. 21A depicts a phylogenetic tree of full-length LTR RTs. Reference LTR RT sequences and MG151 candidates (dots) are highlighted.

[0113] FIG. 21B depicts genomic context of MG151-82 RT (labeled ORF 7). Predicted domains are shown as labeled boxes and long terminal repeats (LTR) are shown as arrows flanking the LTR transposon.

[0114] FIG. 21C depicts 3D structure prediction of MG151-82 showing the protease, RT, RNAse H and integrase domains.

[0115] FIG. 22 depicts multiple sequence alignment of full-length pol protein sequences to highlight the protease, RT-RNAse H, and integrase domains. Catalytic residues for the RT, RNAse H, and integrase domains of the MMLV RT are shown by bars under each domain. The protease domain of the MMLV reference sequence is not shown in the alignment.

[0116] FIGS. 23A-23C depict screening of in vitro activity of viral candidates MG151-80 through MG151-97 by primer extension assay. For FIG. 23A, lane numbers correspond to the following: 1-RNA template annealed to primer; 2-MMLV control RT; 3-Ty3 control RT; 4 through 9 candidates MG151-80 through 85; 10-RT control. For FIG. 23B, lane numbers correspond to the following: 1-RNA template annealed to primer, 2 through 12 candidates MG151-87 through 97, 13-MMLV control RT. FIG. 23C depicts testing of in vitro activity of Ty3 control RT in different buffer conditions. Lane numbers correspond to the following: 1-PURExpress (in vitro expression) no template control; 2-Buffer A (40 mM Tris-HCl pH 7.5, 0.2 M NaCl, 10 mM MgCl₂, 1 mM TCEP); 3-Buffer B (20 mM Tris pH 7.5, 150 mM KCl, 5 mM MgCl₂, 1 mM TCEP, 2% PEG-8000); 4-Buffer C (10 mm Tris-HCl pH 7.5, 80 mm NaCl, 9 mm MgCl₂, 1 mM TCEP, 0.01% (v/v) Triton X-100); 5-Buffer D (10 mM Tris pH 7.5, 130 mM NaCl, 9 mM MgCl₂, 1 mM TCEP, 10% glycerol). Arrows in FIG. 23A through FIG. 23C indicate full-length cDNA product (arrow near the top of the gel) and examples of cDNA drop off (lower arrows).

[0117] FIGS. 24A-24B depict testing of in vitro RT processivity and priming parameters of candidates MG151-89, MG151-92, and MG151-97 on a structured RNA template. For FIG. 24A and FIG. 24B, lane 1: 6,10, and 16 nucleotide oligo markers (arrows); lane 2: 8, 13, and 20 nucleotide oligo marker; lane 3: 43 and 55 nucleotide oligo marker; lanes 4 and 10: 6 nucleotide primer; lanes 5 and 11: 8 nucleotide primer; lanes 6 and 12: 10 nucleotide primer; lanes 7 and 13: 13 nucleotide primer; lanes 8 and 14: 16 nucleotide primer; lanes 9 and 15: 20 nucleotide primer. FIG. 24A lanes 4-9 correspond to reverse transcription reactions containing MMLV with varying primer lengths. MMLV reverse transcribes through the structured RNA hairpin. Lanes 10-15 correspond to reverse transcription reactions containing MG151-89 with varying primer lengths. MG151-89 prefers primer lengths of 16 and 20 nucleotides and appears to stop reverse transcription at the structured RNA hairpin. FIG. 24B lanes 4-9 correspond to reverse transcription reactions containing MG151-92 with varying primer lengths. Lanes 10-15 correspond to reverse transcription reactions containing MG151-97 with varying primer lengths. Neither MG151-92 or MG151-97 appear active under these experimental conditions.

[0118] FIG. 25 depicts phylogenetic analysis of 2407 Retron RTs, with the first candidates selected for downstream characterization in vitro highlighted. 9 of 16 experimentally validated retrons in the literature were added and highlighted in the tree. Stars represent candidate MG154-MG159 and MG173 family members.

[0119] FIG. 26 depicts genomic context of the MG157-1 retron (arrow labeled RT on a line). Retron non-coding RNA (ncRNA) is highlighted with a dotted box.

[0120] FIG. 27A depicts an inset showing the MG157-1 retron ncRNA with its flanking inverted repeats.

[0121] FIG. 27B depicts the predicted structure of the MG157-1 retron ncRNA.

[0122] FIG. 28A depicts genomic context of the MG160-3 retron-like single-domain RT. The region upstream from the RT (dotted box) is conserved across MG160 members.

[0123] FIG. 28B depicts 3D structure prediction of MG160-3 showing the RT domain aligned to a group II intron cryo-EM structure.

[0124] FIG. 28C depicts predicted structures of the 5′ UTR of five MG160 members.

[0125] FIGS. 29A-29B depict screening of in vitro activity of retron-like candidates MG160-1 through MG160-6 and MG160-8 by primer extension assay. FIG. 29A lane numbers correspond to the following samples: 1-PURExpress (in vitro expression) no template control, 2-MMLV control RT, 3-TGIRT-III control RT, 4 through 10 candidates MG160-1 through MG160-6 and MG160-8. Numbering in bold corresponds to gel lanes with active candidates. FIG. 29B depicts quantification of full-length cDNA production by qPCR. Hatched bars correspond to RTs that generate product at least 10-fold above background. Results were determined from two technical replicates. Arrows in FIG. 29A indicate full-length cDNA product (arrow near the top of the gel) and examples of cDNA drop off (lower arrows).

[0126] FIGS. 30A-30C depict cell-free expression of retron RT candidates and generation of retron ncRNAs by in vitro transcription. FIG. 30A depicts confirmation of retron RT protein production in a cell-free expression system. Lanes correspond to the following: 1: ladder, 2: no template control, 3: MG156-1 (39 kDa), 4: MG156-2 (40 kDa), 5: MG157-1 (38 kDa). FIG. 30B depicts confirmation of retron RT protein production in a cell-free expression system. Lanes correspond to the following-1: ladder, 2: no template control, 3: MG157-2 (37 kDa), 4: MG157-5 (43 kDa), 5: MG159-1 (53 kDa), 6: Ec86 (38 kDa, positive control retron RT). FIG. 30C depicts generation of retron ncRNA templates by in vitro transcription. Lanes correspond to the following ncRNAs corresponding to the following retrons-1: MG154-1, 2: MG154-2, 3: MG155-1, 4: MG155-2, 5: MG155-3, 6: MG156-1, 7: MG156-2, 8: MG157-1, 9: MG157-2, 10: MG157-5, 11: MG158-1, 12: MG159-1, 13: Ec86, 14: MG155-4, 15: MG173-1, 16: MG155-5.

[0127] FIG. 31 depicts domain architecture demonstrating that the MG140-1 R2 retrotransposon integrates into 28S rRNA gene. The R2 retrotransposase (less dense hatched bar) contains multiple Zn-fingers, as well as RT and endonuclease domains. MG140-1 is flanked by 5′ and 3′ UTRs, which define the transposon boundaries. MG140-1 integrates precisely between the G and T nucleotides in the target site motif GGTAGC.

[0128] FIG. 32 depicts the testing of RT activity by primer extension with DNA oligo containing phosphorothioate bond modifications. Lane numbers correspond to the following, 1: PURExpress (in vitro expression) no template control with PS-modified Primer 1, 2: PURExpress (in vitro expression) no template control with PS-modified Primer 2, 3: PURExpress (in vitro expression) no template control with PS-modified Primer 3, 4: MMLV RT with unmodified primer, 5: MMLV RT with PS-modified primer 1, 6: MMLV RT with PS-modified primer 2, 7: MMLV RT with PS-modified primer 3, 8: TGIRT-III with unmodified primer, 9: TGIRT-III with PS-modified primer 1, 10: TGIRT-III with PS-modified primer 2, 11: TGIRT-III with PS-modified primer 3, 12: MG153-9 with unmodified primer, 13: MG153-9 with PS-modified primer 1, 14: MG153-9 with PS-modified primer 2, 15 MG153-9 with PS-modified primer 3. MMLV RT and TGIRT-III are control RTs.

[0129] FIG. 33 depicts the screening of activity of retron RTs on an RNA template by primer extension assay. Lane numbers correspond to the following, 1: PURExpress (in vitro expression) no template control, 2: MMLV control RT, 3: MG154-1, 4: MG155-1, 5: MG155-2, 6: MG155-3, 7: MG156-2, 8: MG157-1, 9: MG157-2, 10: MG157-5, 11: MG158-1, 12: MG159-1, 13: Ec86 control retron RT, 14: Sa163 control retron RT, 15: St85 control retron RT. Lanes in bold correspond to retron RTs that exhibit primer extension activity on the tested substrate.

[0130] FIG. 34 depicts the screening of the ability of MG153 GII derived RTs to synthesize cDNA in mammalian cells. Detection of 542 bp cDNA synthesis PCR products were assayed by Taqman qPCR. cDNA activity was normalized to the activity TGIRT control where TGIRT represents a value of 1. Y axis is shown in log 10 scale.

[0131] FIGS. 35A-35C depict protein expression of MG153 GII derived RTs by immunoblots. Cells were transfected with plasmids containing the candidate RTs and protein expression was evaluated by immunoblot, detecting the HA peptide fused to the N termini of the RTs. All lanes were normalized to total protein concentration. White arrows point to bands at 2× the expected molecular size of the protein, which indicate protein dimers. Lanes not relevant for the described experiment in FIGS. 35A and 35B are covered by white boxes. FIG. 35C: Multiple sequence alignment of GII derived RT. The region shown corresponds to positions 196 through 201 of the alignment. The dimerization motif CAQQ (SEQ ID NO: 2267) is highlighted.

[0132] FIG. 36 depicts relative activity of GII derived RTs normalized to protein expression. cDNA synthesis was detected by Taqman qPCR, protein expression was detected by immunoblots. Activity relative to TGIRT was normalized per total protein concentration. Y axis is shown in a linear scale.

[0133] FIGS. 37A-37E depict retroviral RTs for cDNA synthesis. FIG. 37A depicts a phylogenetic tree of full-length LTR RTs. MG151 candidates (grey branches) and a new group of RTs belonging to betaretrovirus (star) are highlighted. FIG. 37B depicts structural alignment of an MG RT domain (dark grey) to reference RT domains from a simian retrovirus and mouse mammary tumor virus (light grey). FIG. 37C depicts a screen of in vitro cDNA synthesis activity of the MG151 family of Retroviral RTs. Lane numbers correspond to the following samples: lane 1: PURExpress (in vitro expression) no template control; lane 2: MMLV control RT; lane 3: MG151-98; lane 4: MG151-99; lane 5: MG151-100; lane 6: MG151-101; lane 7: MG151-102; lane 8: MG151-103; lane 9: MG151-104; lane 10: MG151-105. Lane numbers in bold corresponds to gel lanes with active candidates. Arrows indicate full-length cDNA product (arrow near the top of the gel) and lines indicate examples of cDNA drop off. FIG. 37D depicts a screen of in vitro cDNA synthesis activity of the MG151 family of Retroviral RTs. Lane numbers correspond to the following samples: lane 1: PURExpress (in vitro expression) no template control; lane 2: MMLV control RT; lane 3: MG151-106; lane 4: MG151-107; lane 5: MG151-108; lane 6: MG151-109; lane 7: MG151-110; lane 8: MG151-111; lane 9: MG151-112; lane 10: MG151-113; lane 11: MG151-114; lane 12: MG151-115; lane 13: MG151-116; lane 14: MG151-117. Lane numbers in bold corresponds to gel lanes with active candidates. Arrows indicate full-length cDNA product (arrow near the top of the gel) and lines indicate examples of cDNA drop off. FIG. 37E depicts a screen of in vitro cDNA synthesis activity of the MG151 family of Retroviral RTs with unmodified and modified RNA substrate. Lane numbers correspond to the following samples: lane 1: PURExpress (in vitro expression) no template control using uridine-containing RNA (U-RNA) substrate; lane 2: PURExpress (in vitro expression) no template control using N1-methylpsuedouridine-containing RNA (m1Ψ-RNA) substrate; lane 3: MMLV control RT using U-RNA substrate; lane 4: MMLV control RT using m1Ψ-RNA substrate; lane 5: MG151-118 using U-RNA substrate; lane 6: MG151-118 using m1Ψ-RNA substrate; lane 7: MG151-119 using U-RNA substrate; lane 8: MG151-119 using m1Ψ-RNA substrate; lane 9: MG151-120 using U-RNA substrate; lane 10: MG151-120 using m1Ψ-RNA substrate; lane 11: MG151-121 using U-RNA substrate; lane 12: MG151-121 using m1Ψ-RNA substrate; lane 13: MG151-122 using U-RNA substrate; lane 14: MG151-122 using m1Ψ-RNA substrate; lane 15: MG151-123 using U-RNA substrate; lane 16: MG151-123 using m1Ψ-RNA substrate; lane 17: MG151-124 using U-RNA substrate; lane 18: MG151-124 using m1Ψ-RNA substrate; lane 19: MG151-125 using U-RNA substrate; lane 20: MG151-125 using m1Ψ-RNA substrate; lane 21: MG151-126 using U-RNA substrate; lane 22: MG151-126 using m1Ψ-RNA substrate; lane 23: MG151-127 using U-RNA substrate; lane 24: MG151-127 using m1Ψ-RNA substrate; lane 25: MG151-128 using U-RNA substrate; lane 26: MG151-128 using m1Ψ-RNA substrate. Lane numbers in bold corresponds to gel lanes with active candidates. Arrows indicate full-length cDNA product (arrow near the top of the gel) and lines indicate examples of cDNA drop off.

[0134] FIG. 38A depicts a phylogenetic tree of full-length retron and MG160 RTs. MG160 candidates (grey dots) are highlighted within a long divergent branch within the retron clade.

[0135] FIG. 38B depicts a structural alignment of MG160 RT (dark grey) to a reference retron RT from E. coli (Ec86, light grey). The additional N-terminus end in Ec86 is boxed.

[0136] FIG. 38C depicts multiple sequence alignment of full-length MG160 RTs to the reference Ec86 retron RT. The N-terminus region, RT domain, and C-Terminus regions are shown as bars under the reference sequence, and catalytic residues are highlighted with boxes.

[0137] FIG. 38D depicts multiple sequence alignment regions of active MG160 RTs vs. group II intron and retron reference sequences. Enzyme-specific motifs are highlighted with boxes underneath the sequence as follows: MG160-specific motifs AXXXH and GX(3)Y[V/L]XXVN (SEQ ID NO: 2268); retron-specific motifs NAXXH and VTG; group II intron-specific motifs GXXXY (partially shared with MG160 enzymes) and FLG. A conserved histidine residue and motif [N/S]XXK found in most RTs is also highlighted.

[0138] FIG. 38E depicts a screen of in vitro cDNA synthesis activity of the MG154, MG155, MG156, MG157, MG158, MG159, and MG160 families of retron and retron-like RTs. Lane numbers correspond to the following samples: lane 1: PURExpress (in vitro expression) no template control; lane 2: MMLV control RT; lane 3: MG160-28; lane 4: MG160-31; lane 5: MG160-37; lane 6: MG160-40; lane 7: MG160-51; lane 8: MG160-52; lane 9: MG160-53; lane 10: MG160-54; lane 11: MG160-55; lane 12: MG160-56; lane 13: MG160-57; lane 14: MG160-58; lane 15: MG160-59; lane 16: MG160-60; lane 17: MG160-61; lane 18: not relevant lane; lane 19: MG160-63; lane 20: MG160-64; lane 21: MG160-65; lane 22: MG160-66; lane 23: MG160-67; lane 24: MG155-4; lane 25: MG155-5; lane 26: MG173-1. Lanes 3-23 correspond to the retron-like MG160 family of RTs. Lanes 24-26 correspond to retron RTs. Lane numbers in bold corresponds to gel lanes with active candidates. Arrows indicate full-length cDNA product (arrow near the top of the gel) and examples of cDNA drop off (lower arrows).

[0139] FIG. 38F depicts a screen of in vitro cDNA synthesis activity of the MG154, MG155, MG156, MG157, MG158, and MG159 families of retron RTs. Lane numbers correspond to the following samples: lane 1: PURExpress (in vitro expression) no template control; lane 2: MMLV control RT; lane 3: MG154-1; lane 4: MG155-1; lane 5: MG155-2; lane 6: MG155-3; lane 7: MG156-2; lane 8: MG157-1; lane 9: MG157-2; lane 10: MG157-5; lane 11: MG158-1; lane 12: MG159-1; lane 13: Ec86 control retron RT; lane 14: Sa163 control retron RT; lane 15: St85 control retron RT. Lane numbers in bold corresponds to gel lanes with active candidates. Arrows indicate full-length cDNA product (arrow near the top of the gel) and examples of cDNA drop off (lower lines).

[0140] FIG. 38G depicts a screen of in vitro cDNA synthesis activity of the MG154, MG155, MG156, MG157, MG158, MG159, MG160, and MG173 families of retron and retron-like RTs. Lane numbers correspond to the following samples: lane 1: PURExpress (in vitro expression) no template control; lane 2: MMLV control RT; lane 3: TGIRT-III control RT; lanes 4-7: unrelated MG RTs; lane 8: MG160-17; lane 9: MG154-2; lane 10: MG156-1; lane 11: MG157-3; lane 12: MG157-4; lane 13: MG159-2; lane 14: MG159-3; lane 15: MG173-2. Lane 8 corresponds to a retron-like MG160 family of RTs. Lanes 9-15 correspond to MG retron RTs. Lane numbers in bold corresponds to gel lanes with active candidates. Arrows indicate full-length cDNA product (arrow near the top of the gel) and examples of cDNA drop off (lower arrows or vertical line).

[0141] FIGS. 39A-39D depict a screen of in vitro cDNA synthesis activity of GII intron RTs. For FIG. 39A, lane numbers correspond to the following samples: lane 1: PURExpress (in vitro expression) no template control; lane 2: MMLV control RT; lane 3: TGIRT-III control RT; lane 4: MG153-38; lanes 5-9: MG163-1 through MG163-5; lanes 10-13: MG166-2 through MG166-5. For FIG. 39B, lane numbers correspond to the following samples: lane 1: PURExpress (in vitro expression) no template control; lane 2: MMLV control RT; lane 3: TGIRT-III control RT; lanes 4-14: MG169-1 through MG169-11. For both panels, lane numbers in bold corresponds to gel lanes with active candidates. Arrows indicate full-length cDNA product (arrow near the top of the gel) and examples of cDNA drop off (lower arrows). FIG. 39C depicts a screen of in vitro activity of GII intron Class C, A, B, E, G, ML, and CL (MG153, MG163, MG164, MG166, MG168, MG169, and MG170). Quantification of full-length cDNA production by qPCR. Loosely hatched bars correspond to RTs that produce sufficient cDNA for gel detection. Tightly hatched bars correspond to RTs that have detectable activity only by qPCR and generate product at least 10-fold above background. FIG. 39D depicts a summary of GII intron Class A-G, Class ML, and Class CL cDNA synthesis activity in vitro. RT activity normalized to TGIRT was determined from quantification of full-length cDNA product after performing primer extension using a 202 nt RNA template.

[0142] FIG. 40 depicts screen of in vitro activity of R2 MG140 and MG146 families by primer extension assay with quantification of full-length cDNA production by qPCR. Active RTs are those that generated product at least 10-fold above background (Purex) (dotted line). Results were determined from two technical replicates. Purex is PURExpress (in vitro expression) no-template control; MMLV and Tg R2 are control RTs.

[0143] FIGS. 41A-41B depict primer extension activity of GII intron RTs in vitro on a 4.1 kb RNA template. FIG. 41A depicts a schematic of primer extension assay and detection of cDNA products by Taqman qPCR. The RNA template contains MS2 loops located 3′ of the DNA priming oligo. The resulting full-length cDNA product from the RNA template is 4.1 kb. Taqman probes and primers are designed to quantify amplification of the first (FAM) and last (HEX) 100 bp amplicons of the cDNA. FIG. 41B depicts the percentage of products corresponding to the end of the cDNA (HEX) versus beginning (FAM), which was quantified for MG RTs. TGIRT is a GII Class C control RT, and MMLV is a retroviral control RT.

[0144] FIG. 42 depicts a cartoon showing the methodology used to detect cDNA synthesis in mammalian cells. The first (FAM) and last (HEX) 100 bps of a 4.1 kb RNA template are detected using Taqman based qPCR.

[0145] FIGS. 43A-43I depict a screen of the ability of indicated control RTs and GII intron candidates to synthesize cDNA in mammalian cells. Taqman qPCR was used to detect the first (FAM probe) and last (HEX probe) 100 bp PCR products amplified from cDNA synthesized from an RNA template by the following GII intron RTs: Class A MG163 candidates (FIG. 43A); Class B MG164 candidates (FIG. 43B); Class C MG153 candidates (FIG. 43C); Class D MG165 candidates (FIG. 43D); Class E MG166 candidates (FIG. 43E); Class F MG167 candidates (FIG. 43F); Class G MG168 candidates (FIG. 43G); Class ML MG169 candidates (FIG. 43H); and Class CL MG170 candidates (FIG. 43I).

[0146] FIG. 44 depicts a screen of the ability of indicated control RTs and R2 RT candidates to synthesize cDNA in mammalian cells. Taqman qPCR was used to detect the first (FAM probe) and last (HEX probe) 100 bp PCR products amplified from cDNA synthesized from an RNA template by the indicated R2 RT candidates.

[0147] FIGS. 45A-45B depict a screen of the ability of the indicated group II intron and R2 RT candidates to synthesize cDNA in mammalian cells, with and without an MCP tag. Taqman qPCR was used to detect the first (FAM probe) and last (HEX probe) 100 bp PCR products amplified from cDNA synthesized from an RNA template by the indicated group II intron and R2 RT candidates, as well as control TGIRT group II intron and R2Tg R2 RTs.

[0148] FIG. 46A depicts primer conversion activity of the MG151 family of RTs on standard (U) vs. modified (m1Ψ) RNA template. RT primer extension activity is normalized to MMLV, a control retroviral RT.

[0149] FIG. 46B depicts primer extension activity of diverse RTs on standard and m1Ψ-modified RNA template. Lane numbers correspond to the following samples: lane 1: PURExpress (in vitro expression) NTC with standard RNA template; lane 2: PURExpress (in vitro expression) NTC with m1Ψ-modified RNA template; lane 3: MMLV control RT with standard RNA template; lane 4: MMLV control RT with m1Ψ-modified RNA template; lane 5: TGIRT control RT with standard RNA template; lane 6: TGIRT control RT with m1Ψ-modified RNA template; lane 7: MG153-18 with standard RNA template; lane 8: MG153-18 with m1Ψ-modified RNA template; lane 9: MG153-20 with standard RNA template; lane 10: MG153-20 with m1Ψ-modified RNA template; lane 11: MG153-51 with standard RNA template; lane 12: MG153-51 with m1Ψ-modified RNA template; lane 13: MG153-56 with standard RNA template; lane 14: MG153-56 with m1Ψ-modified RNA template; lane 15: MG170-1 with standard RNA template; lane 16: MG170-1 with m1Ψ-modified RNA template; lane 17: MG140-3 with standard RNA template; lane 18: MG140-3 with m1Ψ-modified RNA template; lane 19: MG140-8 with standard RNA template; lane 20: MG140-8 with m1Ψ-modified RNA template; lane 21: MG140-46 with standard RNA template; lane 22: MG140-46 with m1Ψ-modified RNA template; lane 23: Tg R2 control RT with standard RNA template; lane 24: Tg R2 control RT with m1Ψ-modified RNA template; lane 25: MG160-4 with standard RNA template; lane 26: MG160-4 with m1Ψ-modified RNA template. Arrows indicate full-length cDNA product (arrow near the top of the gel) and examples of cDNA drop off (lower vertical line).

[0150] FIGS. 46C-46D depict quantification of RT activity on standard vs. modified template for diverse RTs. FIG. 46C depicts quantification of primer conversion by gel analysis. Results were determined from two independent experiments. FIG. 46D depicts quantification of full-length cDNA production by qPCR performed for candidates with little or no detectable primer conversion on denaturing gel. Results were determined from two technical qPCR replicates.

[0151] FIGS. 47A-47C depict a screen of the ability of indicated control RTs and candidates RTs to synthesize cDNA in mammalian cells. FIG. 47A depicts a schematic illustration of the methodology used to detect cDNA synthesis in mammalian cells. The first (FAM) and last (HEX) 100 bps of a 4.1 kb RNA template are detected using Taqman based qPCR. Taqman qPCR was used to detect the first (FAM probe) and last (HEX probe) 100 bp PCR products amplified from cDNA synthesized from an RNA template by MG148 family of non-LTR retrotransposon derived RTs (FIG. 47B) and MG160 family of retron-like RTs (FIG. 47C).

[0152] FIG. 48 depicts a screen of rationally engineered mutants of optimal RT candidates MG153-18 and MG153-20 for their ability to synthesize cDNA in mammalian cells. Taqman qPCR detection of first (FAM probe) and last (HEX probe) 100 bp PCR products amplified from cDNA synthesized from an RNA template by indicated control and selected RT candidates. MG153-18 variants showed increased activity by 5 fold compared to its WT counterpart while MG153-20 variants did not improve activity.

[0153] FIG. 49 depicts a screen of putative inactivating mutants of indicated control RTs and optimal group II intron-derived and R2 RT candidates for their ability to synthesize cDNA in mammalian cells. Taqman qPCR detection of first (FAM probe) and last (HEX probe) 100 bp PCR products amplified from cDNA synthesized from an RNA template by indicated control and selected RT candidates.

[0154] FIG. 50 depicts a schematic overview of the mechanism of Retron that produces multiple copy single stranded DNA (msDNA).

[0155] FIG. 51 depicts SDS-PAGE analysis of expression of MG173 and MG192 family from PURExpress. Protein expression marked with an arrow. Lane numbers correspond to the following: Lane 1: Protein ladder; Lane 2: No template control (NTC); Lane 3: MG173-3; Lane 4: MG173-4; Lane 5: MG173-5; Lane 6: Skip; Lane 7: MG173-6; Lane 8: MG173-7; Lane 9: Protein Ladder; Lane 10: No template control (NTC); Lane 11: MG173-8; Lane 12: MG173-9; Lane 13: MG173-10; Lane 14: MG192-1.

[0156] FIG. 52 depicts a screen of generic in vitro cDNA synthesis activity of MG173 and MG192 family of retron RTs. Lane numbers correspond to the following samples: Lane 1: PURExpress no template control, RT reaction does not contain a reverse transcriptase; Lane 2: positive control retroviral RT MMLV; Lane 3: positive control retron RT Ec86; Lanes 4-11: MG173-3 through MG173-10; Lane 12: MG192-1. Lane numbers in bold corresponds to gel lanes with active candidates. Arrows indicate full-length cDNA product (arrow near the top of the gel) and examples of cDNA drop off (lower arrows or vertical line).

[0157] FIGS. 53A and 53B depict in vitro primer extension activity of retron RTs on a 4.1 kb RNA template. FIG. 53A depicts a schematic of primer extension assay and detection of cDNA products by Taqman qPCR. RNA template is annealed to a priming oligo prior to initiation of the cDNA synthesis reaction. The resulting full-length cDNA product from the RNA template is 4.1 kb. Taqman probes and primers are designed to quantify amplification of the first (FAM) and last (HEX) 100 bp amplicons of the cDNA. FIG. 53B depicts the percentage of products corresponding to the end of the cDNA (HEX) versus beginning (FAM) quantified for MG RTs. TGIRT is GII Class C control RT, MMLV is a retroviral control RT, and Ec86 is a retron control RT.

[0158] FIG. 54 depicts the RT error substitution rates of GII intron positive control RT TGIRT and MG GII intron RTs MG153-5, MG153-18, MG153-20, MG153-51, and MG153-53 on standard and modified (N1-methyl pseudouridine, m1′) RNA templates.

[0159] FIGS. 55A-55D depict a screen of the ability of indicated control RTs and engineered candidate RTs to synthesize cDNA in mammalian cells. FIG. 55A shows a cartoon depicting methodology used to detect cDNA synthesis in mammalian cells. The first (FAM) and last (HEX) 100 bps of a 4.1 kb RNA template are detected using Taqman based qPCR. FIGS. 55B-55D show Taqman qPCR detection of first (FAM probe) and last (HEX probe) 100 bp per products amplified from cDNA synthesized from an RNA template by MG140-3 and MG140-8 variants of non-LTR retrotransposon derived RTs (FIG. 55B), MG153-5, MG153-51, and MG169-1 variants of GII intron RTs (FIG. 55C), and MG153-18 and MG153-20 variants of GII intron RTs (FIG. 55D).

[0160] FIGS. 56A-56D depict a screen of the ability of indicated control RTs and candidate RTs to synthesize cDNA in mammalian cells. FIGS. 56A-56D show Taqman qPCR detection of first (FAM probe) and last (HEX probe) 100 bp per products amplified from cDNA synthesized from an RNA template by MG140 family of non-LTR retrotransposon derived RTs (FIG. 56A), MG169 family of GII intron derived RTs (FIG. 56B), MG153 family of GII intron derived RTs (FIG. 56C), and retron RTs (FIG. 56D).

[0161] FIGS. 57A-57B depict analysis of protein expression of selected RT candidates by Western blot. Western blot analysis of MG153-18 and MG153-20 variants of GII intron RTs (FIG. 57A) and selected candidates of GII intron Rts and R2 RTs with high cDNA synthesis activity and processivity (FIG. 57B). Blot showing anti-HA (top) and anti-cyclophilin (bottom). *indicates a non-specific band detected in the anti-HA blot.

[0162] FIGS. 58A-58B depict a screen of the ability of indicated control RTs and trimmed candidate RTs to synthesize cDNA in mammalian cells. Taqman qPCR detection of first (FAM probe) and last (HEX probe) 100 bp PCR products amplified from cDNA synthesized from an RNA template by trimmed variants of MG140-3 and MG140-8 family of non-LTR retrotransposon derived RTs (FIG. 58A) and MG140-74 and MG140-88 family of non-LTR retrotransposon derived RTs (FIG. 58B) in comparison to the activity of endonuclease domain (ED) inactivated and/or reverse transcriptase (RT) domain inactivated RT versions.

[0163] FIGS. 59A-59B depict RT substitution error rates. FIG. 59A shows substitution error rate of RTs calculated from consensable UMI sequences as mismatches/(matches+mismatches) for standard (U) and modified (m1Ψ) RNA templates. Bar graph displays the mean and upper and lower bars indicate the 95% CI determined by Bayesian analysis. Data are derived from two independent experiments each of which were performed in technical triplicate. FIG. 59B shows theoretical length of substitution-free cDNA molecule for each RT calculated as 1/(substitution error rate) for standard and modified RNA templates. MMLV, TGIRT, and MarathonRT are referred to in the text as Control 1, Control 2, and Control 3 respectively.

[0164] FIG. 60 depicts RT error type (mismatch, insertion, or deletion) by position along the standard RNA template. Arrows indicate substitution (or mismatch) hotspot shared between RTs at position 78. The inset image shows a portion of the predicted RNA template fold and that position 78 is located within a putative hairpin. MMLV, TGIRT, and MarathonRT are referred to as Control 1, Control 2, and Control 3 respectively.

[0165] FIG. 61 depicts RT error type (mismatch, insertion, or deletion) by position along the modified RNA template. MMLV, TGIRT, and MarathonRT are referred to as Control 1, Control 2, and Control respectively.

[0166] FIG. 62 depicts RT substitution preference on standard or modified (RNA templates displayed as a confusion matrix comparing the reference nucleotide to the observed nucleotide identity. MMLV, TGIRT, and MarathonRT are referred to as Control 1, Control 2, and Control 3 respectively.

[0167] FIG. 63 depicts RT indel analysis on the standard RNA template, displaying frequency and size of each observed insertion (positive number) or deletion (negative number). MMLV, TGIRT, and MarathonRT are referred to as Control 1, Control 2, and Control 3 respectively.

[0168] FIG. 64 depicts RT indel analysis on the modified RNA template, displaying frequency and size of each observed insertion (positive number) or deletion (negative number). MMLV, TGIRT, and MarathonRT are referred to as Control 1, Control 2, and Control 3 respectively.

[0169] FIG. 65 depicts RT distribution of cDNA length on standard template, showing cDNA drop-off products, full-length, and non-templated additions (NTA). MMLV, TGIRT, and MarathonRT are referred to as Control 1, Control 2, and Control 3 respectively.

[0170] FIG. 66 depicts RT distribution of cDNA length on modified template, showing cDNA drop-off products, full-length, and non-templated additions (NTA). MMLV, TGIRT, and MarathonRT are referred to as Control 1, Control 2, and Control 3 respectively.

[0171] FIG. 67 depicts analysis of RT non-templated addition (NTA) nucleotide incorporation preference on standard RNA template. MMLV, TGIRT, and MarathonRT are referred to as Control 1, Control 2, and Control 3 respectively.

[0172] FIG. 68 depicts analysis of RT non-templated addition (NTA) nucleotide incorporation preference on modified RNA template. MMLV, TGIRT, and MarathonRT are referred to as Control 1, Control 2, and Control 3 respectively.

[0173] FIG. 69 depicts expression screen of MG140-8c5. Medium throughput heterologous expression screen of MG140-8c5 in E. coli. Constructs are expressed in small-scale culture flasks and induced at various temperatures in different growth media. Purification is performed in a 24 deep-well plate, and eluates are run on a gel for analysis. The data show that MG140-8c5 can be purified from the pMGE expression vector with a SUMO fusion, while expression in the pMGD vector with an MBP fusion does not yield full-length protein.

[0174] FIGS. 70A-70D depict large-scale MG140-8c5 expression and purification. MG140-8c5 induced at either 16° C. overnight (FIGS. 70A-70B) or at 23.5° C. for 5 hrs (FIGS. 70C-70D) purified over a 5 mL HisTrap was eluted with an imidazole gradient. Elution profiles monitoring A280 and A260 show significantly higher A260 levels in the 23.5° C. purification (presumably more nucleic acid contamination, FIG. 70C) than in the 16° C. purification (FIG. 70A). Sample run on a gel revealed elution of the protein of interest (~116 kDa) at relatively high imidazole concentrations.

[0175] FIG. 71 depicts primer extension activity of MG140-8c5 on standard and modified RNA template. Gel lanes correspond to the following samples: Lane 1: no RT control, standard template; Lane 2: no RT control, modified template; Lane 3: MMLV control enzyme 1, standard template, replicate 1; Lane 4: MMLV control enzyme 1, modified template, replicate 1; Lane 5:140-8c5, standard template, replicate 1; Lane 6:140-8c5, modified template, replicate 1; Lane 7: AccuScript control enzyme 4, standard template, replicate 1; Lane 8: AccuScript control enzyme 4, modified template, replicate 1; Lane 9: MMLV control enzyme 1, standard template, replicate 2; Lane 10: MMLV control enzyme 1, modified template, replicate 2; Lane 11:140-8c5, standard template, replicate 2; Lane 12:140-8c5, modified template, replicate 2; Lane 13: AccuScript control enzyme 4, standard template, replicate 2; and Lane 14: AccuScript control enzyme 4, modified template, replicate 2.

[0176] FIGS. 72A-72B depict the use of fluorescence anisotropy to detect strand displacement during cDNA synthesis. FIG. 72A: A substrate template RNA is annealed to a priming oligo and a displacement oligo conjugated to a FAM fluorophore. In the annealed state, the fluorophore tumbles slowly and emitted light is not depolarized. Upon strand displacement, the much-smaller oligo-conjugated FAM tumbles in solution much faster and depolarizes light after emission. FIG. 72B: Reactions containing annealed substrate template and purified MG140-8c5 enzyme are initiated by the addition of dNTPs, allowing the enzyme to polymerize cDNA and displace the FAM-labeled oligo, which is detectable by a depolarization of emitted light. By comparison, substrate template without dNTPs maintains emits polarized light due to lack of displacement, and FAM-oligo-only controls depolarize emitted light to a high degree.

[0177] FIGS. 73A-73B depict the use of fluorescence unquenching to detect strand displacement during second-strand synthesis. FIG. 73A: A substrate template ssDNA, synthesized with a 5′ FAM fluorophore conjugation, is annealed to a priming oligo and a displacement oligo with a 3′ quencher moiety. In the annealed state, the fluorophore is quenched by the displacement oligo's quencher molecule, and fluorescence is low. Upon strand displacement, the template FAM is no longer quenched and an increase in fluorescence is observed. FIG. 73B: Reactions containing annealed substrate template and purified MG140-8c5 enzyme are initiated by the addition of dNTPs, allowing the enzyme to polymerize second-strand DNA and displace the quenching oligo thus producing an increase in fluorescence. By contrast, reactions without dNTPs added do not depict the same gradual increase in fluorescence over time

[0178] FIGS. 74A-74B depict the use of strand displacement to measure enzyme activity from PURExpress. FIG. 74A: 1004 nt ssDNA template was produced by PCR amplification followed by Lambda Exonuclease digestion. FIG. 74B: Fluorescence-unquenching assays were set up using template annealed to a priming oligo and a displacement oligo. The data show a rapid increase in fluorescence when PURExpress products MG153-5 and MG153-51 were added, but not when a non-templated control (NTC) was added.

[0179] FIG. 75 depicts a schematic of Template Switching Assay. RT initiates production of cDNA at 3′ end of Donor RNA template. The Acceptor RNA template was used as an equal molar mixture of templates with different 3′ terminal nucleotides (NN-UU, AA, CC, GG), unless otherwise specified. The cDNA products resulting from initiation (FAM probe) and template switch (HEX probe) is quantified by multiplexed Taqman qPCR. Template switching efficiency (% TS) is calculated as the percentage of cDNA detected by HEX divided by FAM

[0180] FIGS. 76A-76B depict template switching of GII intron RTs using Acceptor RNA with terminal 3′UU nucleotides. FIG. 76A: The amount of cDNA produced (nM) determined by the FAM and HEX signal quantified by Taqman qPCR. RTs are derived from a cell-free expression system. NTC is a Non Templated Control, where no RT expression template is provided to the cell-free expression system. Full is the control template, where the Acceptor and Donor sequences are concatenated and the FAM and HEX signals are expected to be equivalent. 10× A:D denotes that the Acceptor RNA template (in this experiment contains 3′ terminal UU nucleotides) was used in 10-fold molar excess to the Donor RNA template. FIG. 76B: The template switching efficiency for each RT, calculated as described in FIG. 75. In both figure panels, TGIRT (GII intron), MMLV (retroviral), and MarathonRT (GII intron) are referred to as Control 1, 2, and 3 respectively.

[0181] FIGS. 77A-77B depict template switching of GII intron RTs using Acceptor RNA with mixed 3′ terminal nucleotides. FIG. 77A: The amount of cDNA produced (nM) determined by the FAM and HEX signal quantified by Taqman qPCR. RTs are derived from a cell-free expression system. NTC is a Non Templated Control, where no RT expression template is provided to the cell-free expression system. Full is the control template, where the Acceptor and Donor sequences are concatenated and the FAM and HEX signals are expected to be equivalent. 10× A:D denotes that the Acceptor RNA template (in this experiment contains mixed 3′ terminal nucleotides described whose preparation is described in the text) was used in 10-fold molar excess to the Donor RNA template. FIG. 77B: The template switching efficiency for each RT, calculated as described in FIG. 75. In both figure panels, TGIRT (GII intron), MMLV (retroviral), and MarathonRT (GII intron) are referred to as Control 1, 2, and 3 respectively.

[0182] FIGS. 78A-78B depict template switching of R2 MG140-8c5 with Acceptor titration. FIG. 78A: The amount of cDNA produced (nM) determined by the FAM and HEX signal quantified by Taqman qPCR. Two buffers were tested to evaluate if buffer composition impacts template switching activity. Buffer 1 composition is specified in methods, as it is the primary buffer used for the template switching reactions. Buffer 2 is composed of 40 mM Tris-HCl (pH 7.5), 0.2 M NaCl, 10 mM MgCl₂, 1 mM TCEP, RNase inhibitor, and 0.5 mM dNTPs. No RT control reactions were performed for each buffer to establish signal background. MG140-8c5 was tested as purified protein. Full is the control template, where the Acceptor and Donor sequences are concatenated and the FAM and HEX signals are expected to be equivalent. 10×, 5×, and 1×A:D denotes that the Acceptor RNA template (in this experiment contains mixed 3′ terminal nucleotides described whose preparation is described in the text) was used in 10-fold, 5-fold, or 1-fold molar excess to the Donor RNA template. FIG. 78B: The template switching efficiency for 140-8c5 with 10-fold, 5-fold, or 1-fold molar excess of Acceptor to Donor in Buffer 1 or Buffer 2, calculated as described in FIG. 75.

[0183] FIG. 79 depicts primed vs. unprimed cDNA synthesis of RTs quantified by qPCR. RNA template designs are indicated at the top of the figure. The first two templates contain a 22-nt poly A sequence on the 3′ end, and is referred to as “A” in the bar graph below. The last two templates have an MS2 hairpin instead of the polyA and are referred to as “MS2” in the bar graph below. The polyA and MS2 templates were tested either with the free 3′ hydroxyl (denoted as 3′OH) or with the free 3′OH blocked (denoted as 3′B, IDT 3′ C3 Spacer/3SpC3/). Each of the templates was also tested primed (P), meaning that is was annealed to a 20-nt priming DNA oligo, or unprimed (UP). The dashed line represents cDNA quantities 10-fold above the highest background negative control, which is PURExpress with a no RT expression template (PUREx NTC). MMLV and TGIRT are referred to as Control 1 and Control 2, respectively.

[0184] FIG. 80 depicts primed cDNA synthesis activity divided by the unprimed activity for each template described in FIG. 79, where A-3OH refers to the polyA sequence with free 3′ hydroxyl, A-3B refers to the polyA sequence with the 3′OH blocked, MS2-3OH refers to the MS2 sequence with a free 3′ hydroxyl, and MS2-3B refers to the MS2 sequence with the 3′OH blocked. MMLV and TGIRT are referred to as Control 1 and Control 2, respectively.

[0185] FIG. 81 depicts primed cDNA synthesis activity divided by the unprimed activity averaged across all 4 templates as described in FIG. 79. RTs ordered by their preference for primed RNA templates. MMLV and TGIRT are referred to as Control 1 and Control 2, respectively.

[0186] FIGS. 82A-82B depict the evaluation of primed and unprimed activity in MG140-8c5. FIG. 82A: 5′-labeled 100 nt RNA template annealed to quenching displacement oligo either in the presence or absence of priming oligo was used as substrate in a reaction containing purified MG140-8c5 and initiated with the addition of dNTPs. The data show an increase in fluorescence—and by extension both cDNA synthesis and strand displacement—for both primed and unprimed substrates. FIG. 82B: 5′-labeled 100 nt ssDNA template annealed to quenching displacement oligo either in the presence or absence of priming oligo was used as substrate in a reaction containing purified MG140-8c5 and initiated with the addition of dNTPs. The data show an increase in fluorescence—and by extension both second-strand synthesis and strand displacement—for both primed and unprimed substrates.

[0187] FIG. 83 depicts a cladogram of the reconstructed ancestral variants of the MG160 family of retron-like RTs. A phylogenetic tree was generated.

[0188] FIG. 84 depicts generic in vitro cDNA synthesis activity of MG157 retron RTs. Lane numbers correspond to the following samples-1: PURExpress no template control, RT reaction does not contain a reverse transcriptase. 2: positive control group II intron RT TGIRT. Lanes 3-9 correspond to MG157 family candidates. Lane numbers in bold corresponds to gel lanes with active candidates. Arrows indicate full-length cDNA product (arrow near the top of the gel) and examples of cDNA drop off (lower arrows or vertical line).

[0189] FIGS. 85A-85B depict graphs showing screening results of the ability of indicated RTs and engineered candidate RTs to synthesize cDNA in mammalian cells. FIG. 85A: Taqman qPCR detection of first (FAM probe) and last (HEX probe) 100 bp PCR products amplified from cDNA synthesized from an RNA template by group II intron RTs of the MG165, MG166, MG167, and MG169 families. FIG. 85B: Taqman qPCR detection of first (FAM probe) and last (HEX probe) 100 bp PCR products amplified from cDNA synthesized from a 4.1 kb RNA template by rationally engineered variants of non-LTR retrotransposon RTs MG140-74 and MG140-88. Bottom dotted line indicates background (no RT control), while top dotted line represents the maximum cDNA synthesis activity of positive control RT TGIRT. Additional positive control RTs include MMLV WT and engineered RT, and R2Tg. Variants of the MG140 family of RTs that display the highest cDNA synthesis activity levels are highlighted with a star.

[0190] FIGS. 86A-86C depict schematic and results of the Template Switching Assay. FIG. 86A shows a schematic of the Template Switching Assay. RT initiates production of cDNA at 3′ end of Donor RNA template. The Acceptor RNA template was used as an equal molar mixture of templates with different 3′ terminal nucleotides (NN-UU, AA, CC, GG), unless otherwise specified. The cDNA products resulting from initiation (FAM probe) and template switch (HEX probe) is quantified by multiplexed Taqman qPCR. Template switching efficiency (% TS) is calculated as the percentage of cDNA detected by HEX divided by FAM. FIG. 86B depicts a graph showing assay results as % Template Switch. The template switching efficiency was quantified for the non-LTR retrotransposase variants MG140-8c5, MG140-8 with a dead endonuclease domain (Endodead), and MG140-8 with a dead endonuclease domain with a D451A mutation, as well as for group II intron RTs MG153-18 and MG153-51. Enzymes were purified prior to template switching experiments. FIG. 86C depicts a graph showing assay results as % Template Switch. The template switching efficiency was quantified for the group II intron RTs MG153-18 and MG153-51, and for the non-LTR retrotransposase variants MG140-3 with a dead endonuclease domain (Endodead), and MG140-3 with the dead endonuclease domain and D451A, F702A and L698A mutations. Enzymes were expressed in a cell-free expression system.

### BRIEF DESCRIPTION OF THE SEQUENCE LISTING

[0191] The Sequence Listing filed herewith provides exemplary polynucleotide and polypeptide sequences for use in methods, compositions, and systems according to the disclosure. Below are exemplary descriptions of sequences therein.

### MG140

[0192] SEQ ID NOs: 1-29, 393-401, 1476, 1850-1926, and 2165-2210 show the full-length peptide sequences of MG140 transposition proteins.

[0193] SEQ ID NOs: 374-386 show the nucleotide sequences of genes encoding HA-His-tagged MG140 reverse transcriptase proteins.

[0194] SEQ ID NOs: 761-798, 2161-2164, and 2211-2232 show the nucleotide sequences of MG140 UTRs.

[0195] SEQ ID NOs: 799-894 show the full-length peptide sequences of MG140 reverse transcriptase proteins.

[0196] SEQ ID NOs: 1535-1536, 1611-1623, 1663-1691, and 1786-1806 show the nucleotide sequences of genes encoding MG140 reverse transcriptase proteins optimized for expression in mammalian cells.

[0197] SEQ ID NOs: 1542-1543 show the nucleotide sequences of genes encoding dead mutant MG140 reverse transcriptase proteins optimized for expression in mammalian cells.

### MG146

[0198] SEQ ID NOs: 402 and 895 show the full-length peptide sequences of MG146 transposition proteins.

[0199] SEQ ID NO: 387 shows the nucleotide sequence of a gene encoding an HA-His-tagged MG146 reverse transcriptase protein.

### MG147

[0200] SEQ ID NO: 388 shows the nucleotide sequence of a gene encoding an HA-His-tagged MG147 reverse transcriptase protein.

### MG148

[0201] SEQ ID NOs: 403-426 show the full-length peptide sequences of MG148 reverse transcriptase proteins.

[0202] SEQ ID NOs: 389-392 show the nucleotide sequences of genes encoding HA-His-tagged MG148 reverse transcriptase proteins.

[0203] SEQ ID NOs: 1504-1507 show the nucleotide sequences of genes encoding MG148 reverse transcriptase proteins optimized for expression in mammalian cells.

### MG149

[0204] SEQ ID NOs: 427-439 show the full-length peptide sequences of MG149 reverse transcriptase proteins.

### MG151

[0205] SEQ ID NOs: 440-554 and 1020-1037 show the full-length peptide sequences of MG151 reverse transcriptase proteins.

[0206] SEQ ID NOs: 356-362 show the nucleotide sequences of genes encoding TwinStrep-tagged MG151 reverse transcriptase proteins.

[0207] SEQ ID NOs: 363-373 show the nucleotide sequences of genes encoding strep-tagged MG151 reverse transcriptase proteins.

[0208] SEQ ID NOs: 964-981 and 1003-1019 show the nucleotide sequences of genes encoding MG151 reverse transcriptase proteins optimized for expression in mammalian cells and cloned into an untethered plasmid.

### MG153

[0209] SEQ ID NOs: 555-608 and 1927-2010 show the full-length peptide sequences of MG153 reverse transcriptase proteins.

[0210] SEQ ID NOs: 30-32 and 40-50 show the nucleotide sequences of fusion proteins comprising MG153 reverse transcriptase proteins and MS2 coat proteins (MCP).

[0211] SEQ ID NOs: 66-119 show the nucleotide sequences of genes encoding strep-tagged MG153 reverse transcriptase proteins.

[0212] SEQ ID NOs: 120-173 show the nucleotide sequences of E. coli codon optimized genes encoding MG153 reverse transcriptase proteins.

[0213] SEQ ID NOs: 740-756 show the nucleotide sequences of genes encoding MCP-tagged MG153 reverse transcriptase proteins.

[0214] SEQ ID NOs: 1521-1534, 1624-1637, 1645-1662, and 1701-1782 show the nucleotide sequences of genes encoding MG153 reverse transcriptase proteins optimized for expression in mammalian cells.

[0215] SEQ ID NOs: 1539-1541 show the nucleotide sequences of genes encoding dead mutant MG153 reverse transcriptase proteins optimized for expression in mammalian cells.

[0216] SEQ ID NOs: 2233-2257 show the nucleotide sequences of MG153 UTRs.

### MG154

[0217] SEQ ID NOs: 609-610 and 1555 show the full-length peptide sequences of MG154 reverse transcriptase proteins.

[0218] SEQ ID NOs: 308-309 show the nucleotide sequences of genes encoding strep-tagged MG154 reverse transcriptase proteins.

[0219] SEQ ID NOs: 324-325 show the nucleotide sequences of E. coli codon optimized genes encoding MG154 reverse transcriptase proteins.

[0220] SEQ ID NOs: 340-341 show the nucleotide sequences of ncRNAs compatible with MG154 nucleases.

### MG155

[0221] SEQ ID NOs: 611-615 and 1544-1545 show the full-length peptide sequences of MG155 reverse transcriptase proteins.

[0222] SEQ ID NOs: 310-312 and 1569-1570 show the nucleotide sequences of genes encoding strep-tagged MG155 reverse transcriptase proteins.

[0223] SEQ ID NOs: 326-328 and 1556-1557 show the nucleotide sequences of E. coli codon optimized genes encoding MG155 reverse transcriptase proteins.

[0224] SEQ ID NOs: 342-344 and 1582-1583 show the nucleotide sequences of ncRNAs compatible with MG155 nucleases.

### MG156

[0225] SEQ ID NOs: 616-617 show the full-length peptide sequences of MG156 reverse transcriptase proteins.

[0226] SEQ ID NOs: 313-314 show the nucleotide sequences of genes encoding strep-tagged MG156 reverse transcriptase proteins.

[0227] SEQ ID NOs: 329-330 show the nucleotide sequences of E. coli codon optimized genes encoding MG156 reverse transcriptase proteins.

[0228] SEQ ID NOs: 345-346 show the nucleotide sequences of ncRNAs compatible with MG156 nucleases.

### MG157

[0229] SEQ ID NOs: 618-622 and 2258-2266 show the full-length peptide sequences of MG157 reverse transcriptase proteins.

[0230] SEQ ID NOs: 315-319 show the nucleotide sequences of genes encoding strep-tagged MG157 reverse transcriptase proteins.

[0231] SEQ ID NOs: 331-335 show the nucleotide sequences of E. coli codon optimized genes encoding MG157 reverse transcriptase proteins.

[0232] SEQ ID NOs: 347-351 and 1842-1849 show the nucleotide sequences of ncRNAs compatible with MG157 nucleases.

### MG158

[0233] SEQ ID NO: 623 shows the full-length peptide sequence of an MG158 reverse transcriptase protein.

[0234] SEQ ID NO: 320 shows the nucleotide sequence of a gene encoding a strep-tagged MG158 reverse transcriptase protein.

[0235] SEQ ID NO: 336 shows the nucleotide sequence of an E. coli codon optimized gene encoding an MG158 reverse transcriptase protein.

[0236] SEQ ID NO: 352 shows the nucleotide sequence of an ncRNA compatible with MG158 nucleases.

### MG159

[0237] SEQ ID NOs: 624-626 show the full-length peptide sequences of MG159 reverse transcriptase proteins.

[0238] SEQ ID NOs: 321-323 show the nucleotide sequences of genes encoding strep-tagged MG159 reverse transcriptase proteins.

[0239] SEQ ID NOs: 337-339 show the nucleotide sequences of E. coli codon optimized genes encoding MG159 reverse transcriptase proteins.

[0240] SEQ ID NOs: 353-355 show the nucleotide sequences of ncRNAs compatible with MG159 nucleases.

[0241] SEQ ID NO: 1785 shows the nucleotide sequence of a gene encoding a MG159 reverse transcriptase protein optimized for expression in mammalian cells.

### MG160

[0242] SEQ ID NOs: 627-673, 1039-1475, and 2011-2026 show the full-length peptide sequences of MG160 reverse transcriptase proteins.

[0243] SEQ ID NOs: 174-180 show the nucleotide sequences of genes encoding strep-tagged MG160 reverse transcriptase proteins.

[0244] SEQ ID NOs: 181-187 show the nucleotide sequences of E. coli codon genes encoding optimized MG160 reverse transcriptase proteins.

[0245] SEQ ID NOs: 982-1002 show the nucleotide sequences of genes encoding MG160 reverse transcriptase proteins optimized for expression in mammalian cells and cloned into a tethered spCas9 (H840A) plasmid.

[0246] SEQ ID NOs: 1508-1520 show the nucleotide sequences of genes encoding MG160 reverse transcriptase proteins optimized for expression in mammalian cells.

### MG163

[0247] SEQ ID NOs: 674-678 show the full-length peptide sequences of MG163 reverse transcriptase proteins.

[0248] SEQ ID NOs: 188-192 show the nucleotide sequences of genes encoding strep-tagged MG163 reverse transcriptase proteins.

[0249] SEQ ID NOs: 193-197 show the nucleotide sequences of E. coli codon genes encoding optimized MG163 reverse transcriptase proteins.

### MG164

[0250] SEQ ID NOs: 679-683 show the full-length peptide sequences of MG164 reverse transcriptase proteins.

[0251] SEQ ID NOs: 198-202 show the nucleotide sequences of genes encoding strep-tagged MG164 reverse transcriptase proteins.

[0252] SEQ ID NOs: 203-207 show the nucleotide sequences of E. coli codon genes encoding optimized MG164 reverse transcriptase proteins.

### MG165

[0253] SEQ ID NOs: 684-692 and 2027-2046 show the full-length peptide sequences of MG165 reverse transcriptase proteins.

[0254] SEQ ID NOs: 208-216 show the nucleotide sequences of genes encoding strep-tagged MG165 reverse transcriptase proteins.

[0255] SEQ ID NOs: 217-225 show the nucleotide sequences of E. coli codon genes encoding optimized MG165 reverse transcriptase proteins.

[0256] SEQ ID NOs: 757-759 show the nucleotide sequences of genes encoding MCP-tagged MG165 reverse transcriptase proteins.

### MG166

[0257] SEQ ID NOs: 693-697 and 2047-2090 show the full-length peptide sequences of MG166 reverse transcriptase proteins.

[0258] SEQ ID NOs: 226-230 show the nucleotide sequences of genes encoding strep-tagged MG166 reverse transcriptase proteins.

[0259] SEQ ID NOs: 231-235 show the nucleotide sequences of E. coli codon genes encoding optimized MG166 reverse transcriptase proteins.

### MG167

[0260] SEQ ID NOs: 698-702 and 2091-2120 show the full-length peptide sequences of MG167 reverse transcriptase proteins.

[0261] SEQ ID NOs: 236-240 show the nucleotide sequences of genes encoding strep-tagged MG167 reverse transcriptase proteins.

[0262] SEQ ID NOs: 241-245 show the nucleotide sequences of E. coli codon genes encoding optimized MG167 reverse transcriptase proteins.

[0263] SEQ ID NOs: 759-760 show the nucleotide sequences of genes encoding MCP-tagged MG167 reverse transcriptase proteins.

### MG168

[0264] SEQ ID NOs: 703-707 show the full-length peptide sequences of MG168 reverse transcriptase proteins.

[0265] SEQ ID NOs: 246-250 show the nucleotide sequences of genes encoding strep-tagged MG168 reverse transcriptase proteins.

[0266] SEQ ID NOs: 251-255 show the nucleotide sequences of E. coli codon genes encoding optimized MG168 reverse transcriptase proteins.

### MG169

[0267] SEQ ID NOs: 708-718 and 2121-2159 show the full-length peptide sequences of MG169 reverse transcriptase proteins.

[0268] SEQ ID NOs: 256-266 show the nucleotide sequences of genes encoding strep-tagged MG169 reverse transcriptase proteins.

[0269] SEQ ID NOs: 267-277 show the nucleotide sequences of E. coli codon genes encoding optimized MG169 reverse transcriptase proteins.

[0270] SEQ ID NOs: 1638-1644 and 1693-1700 show the nucleotide sequences of genes encoding MG169 reverse transcriptase proteins optimized for expression in mammalian cells.

### MG170

[0271] SEQ ID NOs: 719-728 show the full-length peptide sequences of MG170 reverse transcriptase proteins.

[0272] SEQ ID NOs: 278-287 show the nucleotide sequences of genes encoding strep-tagged MG170 reverse transcriptase proteins.

[0273] SEQ ID NOs: 288-297 show the nucleotide sequences of E. coli codon genes encoding optimized MG170 reverse transcriptase proteins.

### MG172

[0274] SEQ ID NOs: 729-733 show the full-length peptide sequences of MG172 reverse transcriptase proteins.

[0275] SEQ ID NOs: 298-302 show the nucleotide sequences of genes encoding strep-tagged MG172 reverse transcriptase proteins.

[0276] SEQ ID NOs: 303-307 show the nucleotide sequences of E. coli codon genes encoding optimized MG172 reverse transcriptase proteins.

### MG173

[0277] SEQ ID NOs: 734-735 and 1546-1553 show the full-length peptide sequences of MG173 reverse transcriptase proteins.

[0278] SEQ ID NOs: 1571-1580 show the nucleotide sequences of genes encoding strep-tagged MG173 reverse transcriptase proteins.

[0279] SEQ ID NOs: 1558-1567 show the nucleotide sequences of E. coli codon optimized genes encoding MG173 reverse transcriptase proteins.

[0280] SEQ ID NOs: 1584-1593 show the nucleotide sequences of ncRNAs compatible with MG173 nucleases.

[0281] SEQ ID NOs: 1783-1784 show the nucleotide sequences of genes encoding MG173 reverse transcriptase proteins optimized for expression in mammalian cells.

### MG176

[0282] SEQ ID NOs: 1038 and 2160 show the full-length peptide sequences of MG176 retrotransposition proteins.

[0283] SEQ ID NO: 1692 shows the nucleotide sequence of a gene encoding a MG176 reverse transcriptase protein optimized for expression in mammalian cells.

### MG192

[0284] SEQ ID NO: 1554 shows the full-length peptide sequence of an MG192 reverse transcriptase protein.

[0285] SEQ ID NO: 1581 shows the nucleotide sequence of a gene encoding a strep-tagged MG192 reverse transcriptase protein.

[0286] SEQ ID NO: 1568 shows the nucleotide sequence of an E. coli codon optimized gene encoding an MG192 reverse transcriptase protein.

[0287] SEQ ID NO: 1594 shows the nucleotide sequence of an ncRNA compatible with MG192 nucleases.

### Other Sequences

[0288] SEQ ID NOs: 736-738, 897-900, 927-928, 952-955, 1494-1497, 1595-1599, 1601-1604, 1809-1810, 1812-1815, 1818-1819 show the nucleotide sequences of primers.

[0289] SEQ ID NOs: 739, 901-902, 1498-1499, and 1605-1606 show the nucleotide sequences of Taqman probes for qPCR.

[0290] SEQ ID NOs: 896, 1493, and 1600 show the nucleotide sequence of an RNA template for cDNA synthesis.

[0291] SEQ ID NOs: 903-926 and 934-951 show the full-length sequences of chemically modified guide RNAs.

[0292] SEQ ID NOs: 929 and 932-933 shows the nucleotide sequences of cDNAs encoding gene targets.

[0293] SEQ ID NO: 930 shows the nucleotide sequence of an RT-nickase linker.

[0294] SEQ ID NO: 931 shows the nucleotide sequence of MG3-6 (H586A).

[0295] SEQ ID NOs: 956-963 show the nucleotide sequences of reverse transcriptases cloned into a tethered MG3-6 (H586A) plasmid.

[0296] SEQ ID NOs: 1500-1502 and 1607-1610 show the nucleotide sequences of genes encoding control reverse transcriptase proteins optimized for expression in mammalian cells.

[0297] SEQ ID NOs: 1537-1538 show the nucleotide sequences of genes encoding dead mutant control reverse transcriptase proteins optimized for expression in mammalian cells.

### DETAILED DESCRIPTION

[0298] While various embodiments of the disclosure have been shown and described herein, it will be obvious to those skilled in the art that such embodiments are provided by way of example only. Numerous variations, changes, and substitutions may occur to those skilled in the art without departing from the disclosure. It should be understood that various alternatives to the embodiments of the disclosure described herein may be employed.

[0299] The practice of some methods disclosed herein employ, unless otherwise indicated, techniques of immunology, biochemistry, chemistry, molecular biology, microbiology, cell biology, genomics, and recombinant DNA.

[0300] As used herein, the singular forms “a,” “an” and “the” are intended to include the plural forms as well, unless the context clearly indicates otherwise. Furthermore, to the extent that the terms “including,” “includes,” “having,” “has,” “with,” or variants thereof are used in either the detailed description and/or the claims, such terms are intended to be inclusive in a manner similar to the term “comprising”.

[0301] The term “about” or “approximately” means within an acceptable error range for the particular value as determined by one of ordinary skill in the art, which will depend in part on how the value is measured or determined, e.g., the limitations of the measurement system. For example, “about” can mean within one or more than one standard deviation, per the practice in the art. Alternatively, “about” can mean a range of up to 20%, up to 15%, up to 10%, up to 5%, or up to 1% of a given value.

[0302] The term “nucleotide,” as used herein, refers to a base-sugar-phosphate combination. Contemplated nucleotides include naturally occurring nucleotides and synthetic nucleotides. Nucleotides are monomeric units of a nucleic acid sequence (e.g., deoxyribonucleic acid (DNA) and ribonucleic acid (RNA)). The term nucleotide includes ribonucleoside triphosphates adenosine triphosphate (ATP), uridine triphosphate (UTP), cytosine triphosphate (CTP), guanosine triphosphate (GTP) and deoxyribonucleoside triphosphates such as dATP, dCTP, dITP, dUTP, dGTP, dTTP, or derivatives thereof. Such derivatives include, for example, [αS]dATP, 7-deaza-dGTP and 7-deaza-dATP, and nucleotide derivatives that confer nuclease resistance on the nucleic acid molecule containing them. The term nucleotide as used herein encompasses dideoxyribonucleoside triphosphates (ddNTPs) and their derivatives. Illustrative examples of ddNTPs include, but are not limited to, ddATP, ddCTP, ddGTP, ddITP, and ddTTP. A nucleotide may be unlabeled or detectably labeled, such as using moieties comprising optically detectable moieties (e.g., fluorophores) or quantum dots. Detectable labels include, for example, radioactive isotopes, fluorescent labels, chemiluminescent labels, bioluminescent labels, and enzyme labels. Fluorescent labels of nucleotides include but are not limited fluorescein, 5-carboxyfluorescein (FAM), 2′7′-dimethoxy-4′5-dichloro-6-carboxyfluorescein (JOE), rhodamine, 6-carboxyrhodamine (R6G), N,N,N′,N′-tetramethyl-6-carboxyrhodamine (TAMRA), 6-carboxy-X-rhodamine (ROX), 4-(4′dimethylaminophenylazo) benzoic acid (DABCYL), Cascade Blue, Oregon Green, Texas Red, Cyanine and 5-(2′-aminoethyl)aminonaphthalene-1-sulfonic acid (EDANS). Specific examples of fluorescently labeled nucleotides include [R6G]dUTP, [TAMRA]dUTP, [R110]dCTP, [R6G]dCTP, [TAMRA]dCTP, [JOE]ddATP, [R6G]ddATP, [FAM]ddCTP, [R110]ddCTP, [TAMRA]ddGTP, [ROX]ddTTP, [dR6G]ddATP, [dR110]ddCTP, [dTAMRA]ddGTP, and [dROX]ddTTP available from Perkin Elmer, Foster City, Calif; FluoroLink DeoxyNucleotides, FluoroLink Cy3-dCTP, FluoroLink Cy5-dCTP, FluoroLink Fluor X-dCTP, FluoroLink Cy3-dUTP, and FluoroLink Cy5-dUTP available from Amersham, Arlington Heights, IL; Fluorescein-15-dATP, Fluorescein-12-dUTP, Tetramethyl-rodamine-6-dUTP, IR770-9-dATP, Fluorescein-12-ddUTP, Fluorescein-12-UTP, and Fluorescein-15-2′-dATP available from Boehringer Mannheim, Indianapolis, Ind.; and Chromosome Labeled Nucleotides, BODIPY-FL-14-UTP, BODIPY-FL-4-UTP, BODIPY-TMR-14-UTP, BODIPY-TMR-14-dUTP, BODIPY-TR-14-UTP, BODIPY-TR-14-dUTP, Cascade Blue-7-UTP, Cascade Blue-7-dUTP, fluorescein-12-UTP, fluorescein-12-dUTP, Oregon Green 488-5-dUTP, Rhodamine Green-5-UTP, Rhodamine Green-5-dUTP, tetramethylrhodamine-6-UTP, tetramethylrhodamine-6-dUTP, Texas Red-5-UTP, Texas Red-5-dUTP, and Texas Red-12-dUTP available from Molecular Probes, Eugene, Oreg. The term nucleotide encompasses chemically modified nucleotides. An exemplary chemically-modified nucleotide is biotin-dNTP. Non-limiting examples of biotinylated dNTPs include, biotin-dATP (e.g., bio-N6-ddATP, biotin-14-dATP), biotin-dCTP (e.g., biotin-11-dCTP, biotin-14-dCTP), and biotin-dUTP (e.g., biotin-11-dUTP, biotin-16-dUTP, biotin-20-dUTP).

[0303] The terms “polynucleotide,” “oligonucleotide,” and “nucleic acid” are used interchangeably to refer to a polymeric form of nucleotides of any length, either deoxyribonucleotides or ribonucleotides, or analogs thereof, either in single-, double-, or multi-stranded form. Contemplated polynucleotides include a gene or fragment thereof. Exemplary polynucleotides include, but are not limited to, DNA, RNA, coding or non-coding regions of a gene or gene fragment, loci (locus) defined from linkage analysis, exons, introns, messenger RNA (mRNA), transfer RNA (tRNA), ribosomal RNA (rRNA), short interfering RNA (siRNA), short-hairpin RNA (shRNA), micro-RNA (miRNA), ribozymes, cDNA, recombinant polynucleotides, branched polynucleotides, plasmids, vectors, cell-free polynucleotides including cell-free DNA (cfDNA) and cell-free RNA (cfRNA), nucleic acid probes, and primers. In a polynucleotide when referring to a T, a T means U (Uracil) in RNA and T (Thymine) in DNA. A polynucleotide can be exogenous or endogenous to a cell and/or exist in a cell-free environment. The term polynucleotide encompasses modified polynucleotides (e.g., altered backbone, sugar, or nucleobase). If present, modifications to the nucleotide structure are imparted before or after assembly of the polymer. Non-limiting examples of modifications include: 5-bromouracil, peptide nucleic acid, xeno nucleic acid, morpholinos, locked nucleic acids, glycol nucleic acids, threose nucleic acids, dideoxynucleotides, cordycepin, 7-deaza-GTP, fluorophores (e.g., rhodamine or fluorescein linked to the sugar), thiol-containing nucleotides, biotin-linked nucleotides, fluorescent base analogs, CpG islands, methyl-7-guanosine, methylated nucleotides, inosine, thiouridine, pseudouridine, dihydrouridine, queuosine, and wyosine. The sequence of nucleotides may be interrupted by non-nucleotide components.

[0304] The terms “transfection” or “transfected” refer to introduction of a nucleic acid into a cell by non-viral or viral-based methods. The nucleic acid molecules may be gene sequences encoding complete proteins or functional portions thereof.

[0305] As used herein, the “non-native” refers to a nucleic acid or polypeptide sequence that is non-naturally occurring. Non-native refers to a non-naturally occurring nucleic acid or polypeptide sequence that comprises modifications such as mutations, insertions, or deletions. The term non-native encompasses fusion nucleic acids or polypeptides that encodes or exhibits an activity (e.g., enzymatic activity, methyltransferase activity, acetyltransferase activity, kinase activity, ubiquitinating activity, etc.) of the nucleic acid or polypeptide sequence to which the non-native sequence is fused. A non-native nucleic acid or polypeptide sequence includes those linked to a naturally-occurring nucleic acid or polypeptide sequence (or a variant thereof) by genetic engineering to generate a chimeric nucleic acid or polypeptide sequence encoding a chimeric nucleic acid or polypeptide.

[0306] As used herein, the “non-native” can also refer to a nucleic acid or polypeptide sequence that is not found in a native nucleic acid or protein. Non-native may refer to affinity tags. Non-native may refer to fusions. Non-native may refer to a naturally occurring nucleic acid or polypeptide sequence that comprises mutations, insertions, or deletions. A non-native sequence may exhibit or encode for an activity (e.g., enzymatic activity, methyltransferase activity, acetyltransferase activity, kinase activity, ubiquitinating activity, etc.) that may also be exhibited by the nucleic acid or polypeptide sequence to which the non-native sequence is fused. A non-native nucleic acid or polypeptide sequence may be linked to a naturally-occurring nucleic acid or polypeptide sequence (or a variant thereof) by genetic engineering to generate a chimeric nucleic acid or polypeptide sequence encoding a chimeric nucleic acid or polypeptide.

[0307] The term “promoter”, as used herein, refers to the regulatory DNA region which controls transcription or expression of a polynucleotide (e.g., a gene) and which may be located adjacent to or overlapping a nucleotide or region of nucleotides at which RNA transcription is initiated. A promoter may contain specific DNA sequences which bind protein factors, often referred to as transcription factors, which facilitate binding of RNA polymerase to the DNA leading to gene transcription. Eukaryotic basal promoters typically, though not necessarily, contain a TATA-box and/or a CAAT box.

[0308] The term “expression,” as used herein, refers to the process by which a nucleic acid sequence or a polynucleotide is transcribed from a DNA template (such as into mRNA or other RNA transcript) and/or the process by which a transcribed mRNA is subsequently translated into peptides, polypeptides, or proteins. Transcripts and encoded polypeptides may be collectively referred to as “gene product.” If the polynucleotide is derived from genomic DNA, expression may include splicing of the mRNA in a eukaryotic cell.

[0309] As used herein, “operably linked”, “operable linkage”, “operatively linked”, or grammatical equivalents thereof refer to an arrangement of genetic elements, e.g., a promoter, an enhancer, a polyadenylation sequence, etc., wherein an operation (e.g., movement or activation) of a first genetic element has some effect on the second genetic element. The effect on the second genetic element can be, but need not be, of the same type as operation of the first genetic element. For example, two genetic elements are operably linked if movement of the first element causes an activation of the second element. For instance, a regulatory element, which may comprise promoter and/or enhancer sequences, is operatively linked to a coding region if the regulatory element helps initiate transcription of the coding sequence. There may be intervening residues between the regulatory element and coding region so long as this functional relationship is maintained.

[0310] A “vector” as used herein, refers to a macromolecule or association of macromolecules that comprises or associates with a polynucleotide and which mediates delivery of the polynucleotide to a cell. Examples of vectors include nucleic-based vectors (e.g., plasmids and viral vectors) and liposomes. An exemplary nucleic-acid based vector comprises genetic elements, e.g., regulatory elements, operatively linked to a gene to facilitate expression of the gene in a target.

[0311] As used herein, “expression cassette” and “nucleic acid cassette” are used interchangeably to refer to a component of a vector comprising a combination of nucleic acid sequences or elements (e.g., therapeutic gene, promoter, and a terminator) that are expressed together or are operably linked for expression. The terms encompass an expression cassette including a combination of regulatory elements and a gene or genes to which they are operably linked for expression.

[0312] A “functional fragment” of a DNA or protein sequence refers to a fragment that retains a biological activity (either functional or structural) that is substantially similar to a biological activity of the full-length DNA or protein sequence. A biological activity of a DNA sequence includes its ability to influence expression in a manner attributed to the full-length sequence.

[0313] The terms “engineered,” “synthetic,” and “artificial” are used interchangeably herein to refer to an object that has been modified by human intervention. For example, the terms refer to a polynucleotide or polypeptide that is non-naturally occurring. An engineered peptide has, but does not require, low sequence identity (e.g., less than 50% sequence identity, less than 25% sequence identity, less than 10% sequence identity, less than 5% sequence identity, less than 1% sequence identity) to a naturally occurring human protein. For example, VPR and VP64 domains are synthetic transactivation domains. Non-limiting examples include the following: a nucleic acid modified by changing its sequence to a sequence that does not occur in nature; a nucleic acid modified by ligating it to a nucleic acid that it does not associate with in nature such that the ligated product possesses a function not present in the original nucleic acid; an engineered nucleic acid synthesized in vitro with a sequence that does not exist in nature; a protein modified by changing its amino acid sequence to a sequence that does not exist in nature; an engineered protein acquiring a new function or property. An “engineered” system comprises at least one engineered component.

[0314] As used herein, the term “transposable element” refers to a DNA sequence that can move from one location in the genome to another (i.e., it can be “transposed”). Transposable elements can be generally divided into two classes. Class I transposable elements, or “retrotransposons”, are transposed via transcription and translation of an RNA intermediate which is subsequently reincorporated into its new location into the genome via reverse transcription (a process mediated by a reverse transcriptase). Class II transposable elements, or “DNA transposons”, are transposed via a complex of single- or double-stranded DNA flanked on either side by a transposase.

[0315] As used herein, the term “retrotransposons” refers to Class I transposable elements that function according to a two-part “copy and paste” mechanism involving an RNA intermediate. “Retrotransposase” refers to an enzyme responsible for transposition of a retrotransposon. The retrotransposase can comprise a reverse transcriptase domain, one or more zinc finger domains, an endonuclease domain, or combinations thereof.

[0316] As used herein, the terms “gene editing” and “genome editing” can be used interchangeably. Gene editing or genome editing means to change the nucleic acid sequence of a gene or a genome. Genome editing can include, for example, insertions, deletions, and mutations. Genome editing can be performed by a gene editing system, for example a retrotransposase.

[0317] As used herein, the term “complex” refers to a joining of at least two components. The two components may each retain the properties/activities they had prior to forming the complex or gain properties as a result of forming the complex. The joining includes, but is not limited to, covalent bonding, non-covalent bonding (i.e., hydrogen bonding, ionic interactions, Van der Waals interactions, and hydrophobic bond), use of a linker, fusion, or any other suitable method. Contemplated components of the complex include polynucleotides, polypeptides, or combinations thereof. For example, a complex comprises an endonuclease and a guide polynucleotide.

[0318] The term “sequence identity” or “percent identity” in the context of two or more nucleic acids or polypeptide sequences, refers to two (e.g., in a pairwise alignment) or more (e.g., in a multiple sequence alignment) sequences that are the same or have a specified percentage of amino acid residues or nucleotides that are the same, when compared and aligned for maximum correspondence over a local or global comparison window, as measured using a sequence comparison algorithm. Suitable sequence comparison algorithms for polypeptide sequences include, e.g., BLASTP using parameters of a wordlength (W) of 3, an expectation (E) of 10, and the BLOSUM62 scoring matrix setting gap costs at existence of 11, extension of 1, and using a conditional compositional score matrix adjustment for polypeptide sequences longer than 30 residues; BLASTP using parameters of a wordlength (W) of 2, an expectation (E) of 1000000, and the PAM30 scoring matrix setting gap costs at 9 to open gaps and 1 to extend gaps for sequences of less than 30 residues (these are the default parameters for BLASTP in the BLAST suite available at https://blast.ncbi.nlm.nih.gov); CLUSTALW with the Smith-Waterman homology search algorithm parameters with a match of 2, a mismatch of −1, and a gap of −1; MUSCLE with default parameters; MAFFT with parameters of a retree of 2 and max iterations of 1000; Novafold with default parameters; HMMER hmmalign with default parameters.

[0319] The term “optimally aligned” in the context of two or more nucleic acids or polypeptide sequences, refers to two (e.g., in a pairwise alignment) or more (e.g., in a multiple sequence alignment) sequences that have been aligned to maximal correspondence of amino acids residues or nucleotides, for example, as determined by the alignment producing a highest or “optimized” percent identity score.

[0320] The term “open reading frame” or “ORF” refers to a nucleotide sequence that can encode a protein, or a portion of a protein. An open reading frame can begin with a start codon (represented as, e.g., AUG for an RNA molecule and ATG in a DNA molecule in the standard code) and can be read in codon-triplets until the frame ends with a STOP codon (represented as, e.g., UAA, UGA, or UAG for an RNA molecule and TAA, TGA, or TAG in a DNA molecule in the standard code).

[0321] Included in the current disclosure are variants of any of the enzymes described herein with one or more conservative amino acid substitutions. Such conservative substitutions can be made in the amino acid sequence of a polypeptide without disrupting the three-dimensional structure or function of the polypeptide. Conservative substitutions can be accomplished by substituting amino acids with similar hydrophobicity, polarity, and R chain length for one another. Additionally, or alternatively, by comparing aligned sequences of homologous proteins from different species, conservative substitutions can be identified by locating amino acid residues that have been mutated between species (e.g., non-conserved residues) without altering the basic functions of the encoded proteins. Such conservatively substituted variants may include variants with at least about 20%, at least about 25%, at least about 30%, at least about 35%, at least about 40%, at least about 45%, at least about 50%, at least about 55%, at least about 60%, at least about 65%, at least about 70%, at least about 75%, at least about 80%, at least about 85%, at least about 86%, at least about 87%, at least about 88%, at least about 89%, at least about 90%, at least about 91%, at least about 92%, at least about 93%, at least about 94%, at least about 95%, at least about 96%, at least about 97%, at least about 98%, at least about 99%, or 100% sequence identity to any one of the retrotransposase protein sequences described herein (e.g., MG140 family retrotransposases described herein, or any other family retrotransposase described herein). In some embodiments, such conservatively substituted variants are functional variants. Such functional variants can encompass sequences with substitutions such that the activity of one or more critical active site residues of the retrotransposase are not disrupted. In some embodiments, a functional variant of any of the proteins described herein lacks substitution of at least one of the conserved or functional residues. In some embodiments, a functional variant of any of the proteins described herein lacks substitution of all of the conserved or functional residues.

[0322] Also included in the current disclosure are variants of any of the enzymes described herein with substitution of one or more catalytic residues to decrease or eliminate activity of the enzyme (e.g., decreased-activity variants). In some embodiments, a decreased activity variant as a protein described herein comprises a disrupting substitution of at least one, at least two, or all three catalytic residues.

[0323] Conservative substitution tables providing functionally similar amino acids are available from a variety of references (see, for e.g., Creighton, Proteins: Structures and Molecular Properties (W H Freeman & Co.; 2nd edition (December 1993)). The following eight groups each contain amino acids that are conservative substitutions for one another:
[0324] 1) Alanine (A), Glycine (G);
[0325] 2) Aspartic acid (D), Glutamic acid (E);
[0326] 3) Asparagine (N), Glutamine (Q);
[0327] 4) Arginine (R), Lysine (K);
[0328] 5) Isoleucine (I), Leucine (L), Methionine (M), Valine (V);
[0329] 6) Phenylalanine (F), Tyrosine (Y), Tryptophan (W);
[0330] 7) Serine(S), Threonine (T); and
[0331] 8) Cysteine (C), Methionine (M).

[0332] Also included in the current disclosure are variants of any of the nucleic acid sequences described herein with one or more substitutions, deletions, or insertions. In some embodiments, such a variant has at least about 80%, at least about 81%, at least about 82%, at least about 83%, at least about 84%, at least about 85%, at least about 86%, at least about 87%, at least about 88%, at least about 89%, at least about 90%, at least about 91%, at least about 92%, at least about 93%, at least about 94%, at least about 95%, at least about 96%, at least about 97%, at least about 98%, at least about 99%, or 100% sequence identity to any one of the nucleic acid sequences described herein.

[0333] Some of the protein sequences described herein involve the determination of a particular domain (e.g., a reverse transcriptase or RT domain) from the sequence of a selected larger protein (e.g., a retrotransposase). In such cases, multiple sequence alignments (MSA) with a reference larger protein (e.g., a retrotransposase) where the domains have been validated (e.g., with 3D structures) is used to identify domain boundaries by aligning the selected protein to the larger protein with validated domains. When MSAs are inconclusive because the sequences are so divergent, 3D structures of the larger proteins are determined and the structural domains are compared with known domains to define the boundaries. These boundaries can be further verified by ensuring the presence of important catalytic residues for the domain within the domain boundaries.

[0334] As used herein, the term “LINE retrotransposase” refers to a class of autonomous non-LTR retrotransposons (Long INterspersed Element). As used herein, the term “R2 retrotransposase” or “R4 retrotransposase” refer to subclasses of LINE retrotransposases that share similar domain architecture but differ in that R2 retrotransposases can be site specific (e.g., integrating at specific sites of an rRNA gene) while R4 retrotransposons can integrate both at an rRNA gene as well as other non-specific sites containing repeats.

### Overview

[0335] The discovery of new transposable elements with unique functionality and structure may offer the potential to further disrupt deoxyribonucleic acid (DNA) editing technologies, improving speed, specificity, functionality, and ease of use. Relative to the predicted prevalence of transposable elements in microbes and the sheer diversity of microbial species, relatively few functionally characterized transposable elements exist in the literature. This is partly because a huge number of microbial species may not be readily cultivated in laboratory conditions. Metagenomic sequencing from natural environmental niches containing large numbers of microbial species can offer the potential to drastically increase the number of new transposable elements documented and speed the discovery of new oligonucleotide editing functionalities.

[0336] Transposable elements are deoxyribonucleic acid sequences that can change position within a genome, often resulting in the generation or amelioration of mutations. In eukaryotes, a great proportion of the genome, and a large share of the mass of cellular DNA, is attributable to transposable elements. Although transposable elements are “selfish genes” which propagate themselves at the expense of other genes, they have been found to serve various important functions and to be crucial to genome evolution. Based on their mechanism, transposable elements are classified as either Class I “retrotransposons” or Class II “DNA transposons”.

[0337] Class I transposable elements, also referred to as retrotransposons, function according to a two-part “copy and paste” mechanism involving an RNA intermediate. First, the retrotransposon is transcribed. The resulting RNA is subsequently converted back to DNA by reverse transcriptase (generally encoded by the retrotransposon itself), and the reverse transcribed retrotransposon is integrated into its new position in the genome by integrase. Retrotransposons are further classified into three orders. Retrotransposons with long terminal repeats (“LTRs”) encode reverse transcriptase and are flanked by long strands of repeating DNA. Retrotransposons with long interspersed nuclear elements (“LINEs”) encode reverse transcriptase, lack LTRs, and are transcribed by RNA polymerase II. Retrotransposons with short interspersed nuclear elements (“SINEs”) are transcribed by RNA polymerase III but lack reverse transcriptase, instead relying on the reverse transcription machinery of other transposable elements (e.g., LINEs).

[0338] Class II transposable elements, also referred to as DNA transposons, function according to mechanisms that do not involve an RNA intermediate. Many DNA transposons display a “cut and paste” mechanism in which transposase binds terminal inverted repeats (“TIRs”) flanking the transposon, cleaves the transposon from the donor region, and inserts it into the target region of the genome. Others, referred to as “helitrons,” display a “rolling circle” mechanism involving a single-stranded DNA intermediate and mediated by an undocumented protein understood to possess HUH endonuclease function and 5′ to 3′ helicase activity. First, a circular strand of DNA is nicked to create two single DNA strands. The protein remains attached to the 5′ phosphate of the nicked strand, leaving the 3′ hydroxyl end of the complementary strand exposed and thus allowing a polymerase to replicate the non-nicked strand. Once replication is complete, the new strand disassociates and is itself replicated along with the original template strand. Still other DNA transposons, “Polintons,” are theorized to undergo a “self-synthesis” mechanism. The transposition is initiated by an integrase's excision of a single-stranded extra-chromosomal Polinton element, which forms a racket-like structure. The Polinton undergoes replication with DNA polymerase B, and the double stranded Polinton is inserted into the genome by the integrase. Additionally, some DNA transposons, such as those in the IS200/IS605 family, proceed via a “peel and paste” mechanism in which TnpA excises a piece of single-stranded DNA (as a circular “transposon joint”) from the lagging strand template of the donor gene and reinserts it into the replication fork of the target gene.

[0339] While transposable elements have found some use as biological tools, documented transposable elements do not encompass the full range of possible biodiversity and targetability, and may not represent all possible activities. Here, thousands of genomic fragments were mined from numerous metagenomes for transposable elements. The documented diversity of transposable elements may have been expanded and systems may have been developed into highly targetable, compact, and precise gene editing agents.

[0340] Retrons are bacterial retroelements that produce single-stranded, reverse-transcribed DNA (RT-DNA) that is a critical part of a newly discovered phage defense system. Retrons have the unique ability to produce multicopy single stranded DNAs (msDNAs) that are comprised of one strand of structured RNA, the ‘msr,’ connected to one strand of DNA, the ‘msd’ and flanked by two inverted and complementary repeats (5′ IRa1 and 3′ IRa2; FIG. 50). The msr and msd are encoded in a compact, contiguous transcriptional cassette that also includes a specialized reverse transcriptase (RT; ~300-400 amino acids); this cassette is referred to as a whole retron (FIG. 50). The RT initiates reverse transcription using as primers the base-paired 5′ and 3′ stem (IRa1 and IRa2) of the msr-msd and the conserved priming guanosine within a conserved AGC sequence in the msr at the 3′ end. The msr and msd molecules are joined by a 2′-5′ phosphodiester bond between a priming guanosine and the phosphate of the 5′ end of the msd that covalently links the RNA and DNA strands into a single branched molecule (FIG. 50). The mechanism for precise termination is not yet understood. The RT extends the reverse transcript until a defined position at which reverse transcription stops via an unknown mechanism. It has been observed that the RT terminates at similar sites in vitro and in cells, strongly suggesting that RNA structure may direct RT termination (Shimamoto T. et al., 1995; Simon A. et al., 2019). Interestingly, retron reverse transcriptases (RTs) typically lack an RNase H domain and, therefore, depend on endogenous RNase H1 to remove RNA templates from RT-DNA. Concurrently with reverse transcription, cellular RNAse H1 activity degrades the template of the msd, excluding ~5-10 RNA bases at its 5′ end. This segment of the RNA remains hybridized to the complementary reverse transcript and is considered to be part of both the msr and msd in the mature msDNA form (FIG. 50).

[0341] Retrons could be harnessed to become powerful tools for genome editing as they are able to produce high copy number intracellular DNA molecules in hosts. Early experiments showed that a Retron from E. coli (Ec67) msr and RT could successfully reverse transcribe another Retron (Ec73) msd. This experiment indicated that while a specific retron's msr and associated RT are always paired and essential to initiate reverse transcription, the msd could be variable and can encode an in-situ DNA with an artificial sequence of interest. This critical finding could enable the repurposing of retrons for biotechnological and therapeutic applications.

### MG Enzymes

[0342] In some aspects, the present disclosure provides for retrotransposases. In some embodiments, the retrotransposase is a MG140, MG146, MG147, MG148, MG149, MG151, MG153, MG154, MG155, MG156, MG157, MG158, MG159, MG160, MG163, MG164, MG165, MG166, MG167, MG168, MG169, MG170, MG172, MG173, or MG176 retrotransposase. (see FIG. 1). In some embodiments, the retrotransposases are less than about 1,400 amino acids in length. In some embodiments, the retrotransposases simplify delivery and extend therapeutic applications.

[0343] In some embodiments, the present disclosure provides for an engineered retrotransposase system discovered through metagenomic sequencing. In some embodiments, the metagenomic sequencing is conducted on samples. In some embodiments, the samples are collected from a variety of environments. In some embodiments, the environment is a human microbiome, an animal microbiome, environments with high temperatures, environments with low temperatures. In some embodiments, the environment includes sediment.

[0344] In some embodiments, the present disclosure provides for an engineered retrotransposase system comprising a retrotransposase derived from an uncultivated microorganism. In some embodiments, the retrotransposase is configured to bind a 3′ untranslated region (UTR). In some embodiments, the retrotransposase binds a 5′ untranslated region (UTR).

[0345] In some embodiments, the retrotransposase comprises a sequence having at least about 20%, at least about 25%, at least about 30%, at least about 35%, at least about 40%, at least about 45%, at least about 50%, at least about 55%, at least about 60%, at least about 65%, at least about 70%, at least about 75%, at least about 80%, at least about 85%, at least about 90%, at least about 91%, at least about 92%, at least about 93%, at least about 94%, at least about 95%, at least about 96%, at least about 97%, at least about 98%, or at least about 99% sequence identity to any one of SEQ ID NOs: 1-29, 393-735, 799-895, 1020-1476, 1544-1554, 1850-2160, 2165-2210, and 2258-2266. In some embodiments, the retrotransposase comprises a sequence having at least about 70% identity to any one of SEQ ID NOs: 1-29, 393-735, 799-895, 1020-1476, 1544-1554, 1850-2160, 2165-2210, and 2258-2266. In some embodiments, the retrotransposase comprises a sequence having at least about 75% identity to any one of SEQ ID NOs: 1-29, 393-735, 799-895, 1020-1476, 1544-1554, 1850-2160, 2165-2210, and 2258-2266. In some embodiments, the retrotransposase comprises a sequence having at least about 80% identity to any one of SEQ ID NOs: 1-29, 393-735, 799-895, 1020-1476, 1544-1554, 1850-2160, 2165-2210, and 2258-2266. In some embodiments, the retrotransposase comprises a sequence having at least about 85% identity to any one of SEQ ID NOs: 1-29, 393-735, 799-895, 1020-1476, 1544-1554, 1850-2160, 2165-2210, and 2258-2266. In some embodiments, the retrotransposase comprises a sequence having at least about 90% identity to any one of SEQ ID NOs: 1-29, 393-735, 799-895, 1020-1476, 1544-1554, 1850-2160, 2165-2210, and 2258-2266. In some embodiments, the retrotransposase comprises a sequence having at least about 95% identity to any one of SEQ ID NOs: 1-29, 393-735, 799-895, 1020-1476, 1544-1554, 1850-2160, 2165-2210, and 2258-2266. In some embodiments, the retrotransposase comprises a sequence having at least about 96% identity to any one of SEQ ID NOs: 1-29, 393-735, 799-895, 1020-1476, 1544-1554, 1850-2160, 2165-2210, and 2258-2266. In some embodiments, the retrotransposase comprises a sequence having at least about 97% identity to any one of SEQ ID NOs: 1-29, 393-735, 799-895, 1020-1476, 1544-1554, 1850-2160, 2165-2210, and 2258-2266. In some embodiments, the retrotransposase comprises a sequence having at least about 98% identity to any one of SEQ ID NOs: 1-29, 393-735, 799-895, 1020-1476, 1544-1554, 1850-2160, 2165-2210, and 2258-2266. In some embodiments, the retrotransposase comprises a sequence having at least about 99% identity to any one of SEQ ID NOs: 1-29, 393-735, 799-895, 1020-1476, 1544-1554, 1850-2160, 2165-2210, and 2258-2266. In some embodiments, the retrotransposase comprises a sequence having 100% identity to any one of SEQ ID NOs: 1-29, 393-735, 799-895, 1020-1476, 1544-1554, 1850-2160, 2165-2210, and 2258-2266.

[0346] In some embodiments, the retrotransposase is a MG140 retrotransposase (i.e., SEQ ID NOs: 1-29, 393-401, 799-894, 1476, 1850-1926, and 2165-2210). In some embodiments, the retrotransposase comprises a sequence having at least about 20%, at least about 25%, at least about 30%, at least about 35%, at least about 40%, at least about 45%, at least about 50%, at least about 55%, at least about 60%, at least about 65%, at least about 70%, at least about 75%, at least about 80%, at least about 85%, at least about 90%, at least about 91%, at least about 92%, at least about 93%, at least about 94%, at least about 95%, at least about 96%, at least about 97%, at least about 98%, or at least about 99% sequence identity to any one of SEQ ID NOs: 1-29, 393-401, 799-894, 1476, 1850-1926, and 2165-2210. In some embodiments, the retrotransposase comprises a sequence having at least about 70% identity to any one of SEQ ID NOs: 1-29, 393-401, 799-894, 1476, 1850-1926, and 2165-2210. In some embodiments, the retrotransposase comprises a sequence having at least about 75% identity to any one of SEQ ID NOs: 1-29, 393-401, 799-894, 1476, 1850-1926, and 2165-2210. In some embodiments, the retrotransposase comprises a sequence having at least about 80% identity to any one of SEQ ID NOs: 1-29, 393-401, 799-894, 1476, 1850-1926, and 2165-2210. In some embodiments, the retrotransposase comprises a sequence having at least about 85% identity to any one of SEQ ID NOs: 1-29, 393-401, 799-894, 1476, 1850-1926, and 2165-2210. In some embodiments, the retrotransposase comprises a sequence having at least about 90% identity to any one of SEQ ID NOs: 1-29, 393-401, 799-894, 1476, 1850-1926, and 2165-2210. In some embodiments, the retrotransposase comprises a sequence having at least about 95% identity to any one of SEQ ID NOs: 1-29, 393-401, 799-894, 1476, 1850-1926, and 2165-2210. In some embodiments, the retrotransposase comprises a sequence having at least about 96% identity to any one of SEQ ID NOs: 1-29, 393-401, 799-894, 1476, 1850-1926, and 2165-2210. In some embodiments, the retrotransposase comprises a sequence having at least about 97% identity to any one of SEQ ID NOs: 1-29, 393-401, 799-894, 1476, 1850-1926, and 2165-2210. In some embodiments, the retrotransposase comprises a sequence having at least about 98% identity to any one of SEQ ID NOs: 1-29, 393-401, 799-894, 1476, 1850-1926, and 2165-2210. In some embodiments, the retrotransposase comprises a sequence having at least about 99% identity to any one of SEQ ID NOs: 1-29, 393-401, 799-894, 1476, 1850-1926, and 2165-2210. In some embodiments, the retrotransposase comprises a sequence having 100% identity to any one of SEQ ID NOs: 1-29, 393-401, 799-894, 1476, 1850-1926, and 2165-2210.

[0347] In some embodiments, the retrotransposase is a MG146 retrotransposase (i.e., SEQ ID NO: 402 or SEQ ID NO: 895). In some embodiments, the retrotransposase comprises a sequence having at least about 20%, at least about 25%, at least about 30%, at least about 35%, at least about 40%, at least about 45%, at least about 50%, at least about 55%, at least about 60%, at least about 65%, at least about 70%, at least about 75%, at least about 80%, at least about 85%, at least about 90%, at least about 91%, at least about 92%, at least about 93%, at least about 94%, at least about 95%, at least about 96%, at least about 97%, at least about 98%, or at least about 99% sequence identity to SEQ ID NO: 402 or SEQ ID NO: 895. In some embodiments, the retrotransposase comprises a sequence having at least about 70% identity to SEQ ID NO: 402 or SEQ ID NO: 895. In some embodiments, the retrotransposase comprises a sequence having at least about 75% identity to SEQ ID NO: 402 or SEQ ID NO: 895. In some embodiments, the retrotransposase comprises a sequence having at least about 80% identity to SEQ ID NO: 402 or SEQ ID NO: 895. In some embodiments, the retrotransposase comprises a sequence having at least about 85% identity to SEQ ID NO: 402 or SEQ ID NO: 895. In some embodiments, the retrotransposase comprises a sequence having at least about 90% identity to SEQ ID NO: 402 or SEQ ID NO: 895. In some embodiments, the retrotransposase comprises a sequence having at least about 95% identity to SEQ ID NO: 402 or SEQ ID NO: 895. In some embodiments, the retrotransposase comprises a sequence having at least about 96% identity to SEQ ID NO: 402 or SEQ ID NO: 895. In some embodiments, the retrotransposase comprises a sequence having at least about 97% identity to SEQ ID NO: 402 or SEQ ID NO: 895. In some embodiments, the retrotransposase comprises a sequence having at least about 98% identity to SEQ ID NO: 402 or SEQ ID NO: 895. In some embodiments, the retrotransposase comprises a sequence having at least about 99% identity to SEQ ID NO: 402 or SEQ ID NO: 895. In some embodiments, the retrotransposase comprises a sequence having 100% identity to SEQ ID NO: 402 or SEQ ID NO: 895.

[0348] In some embodiments, the retrotransposase is a MG148 retrotransposase (i.e., SEQ ID NOs: 403-426). In some embodiments, the retrotransposase comprises a sequence having at least about 20%, at least about 25%, at least about 30%, at least about 35%, at least about 40%, at least about 45%, at least about 50%, at least about 55%, at least about 60%, at least about 65%, at least about 70%, at least about 75%, at least about 80%, at least about 85%, at least about 90%, at least about 91%, at least about 92%, at least about 93%, at least about 94%, at least about 95%, at least about 96%, at least about 97%, at least about 98%, or at least about 99% sequence identity to any one of SEQ ID NOs: 403-426. In some embodiments, the retrotransposase comprises a sequence having at least about 70% identity to any one of SEQ ID NOs: 403-426. In some embodiments, the retrotransposase comprises a sequence having at least about 75% identity to any one of SEQ ID NOs: 403-426. In some embodiments, the retrotransposase comprises a sequence having at least about 80% identity to any one of SEQ ID NOs: 403-426. In some embodiments, the retrotransposase comprises a sequence having at least about 85% identity to any one of SEQ ID NOs: 403-426. In some embodiments, the retrotransposase comprises a sequence having at least about 90% identity to any one of SEQ ID NOs: 403-426. In some embodiments, the retrotransposase comprises a sequence having at least about 95% identity to any one of SEQ ID NOs: 403-426. In some embodiments, the retrotransposase comprises a sequence having at least about 96% identity to any one of SEQ ID NOs: 403-426. In some embodiments, the retrotransposase comprises a sequence having at least about 97% identity to any one of SEQ ID NOs: 403-426. In some embodiments, the retrotransposase comprises a sequence having at least about 98% identity to any one of SEQ ID NOs: 403-426. In some embodiments, the retrotransposase comprises a sequence having at least about 99% identity to any one of SEQ ID NOs: 403-426. In some embodiments, the retrotransposase comprises a sequence having 100% identity to any one of SEQ ID NOs: 403-426.

[0349] In some embodiments, the retrotransposase is a MG149 retrotransposase (i.e., SEQ ID NOs: 427-439). In some embodiments, the retrotransposase comprises a sequence having at least about 20%, at least about 25%, at least about 30%, at least about 35%, at least about 40%, at least about 45%, at least about 50%, at least about 55%, at least about 60%, at least about 65%, at least about 70%, at least about 75%, at least about 80%, at least about 85%, at least about 90%, at least about 91%, at least about 92%, at least about 93%, at least about 94%, at least about 95%, at least about 96%, at least about 97%, at least about 98%, or at least about 99% sequence identity to any one of SEQ ID NOs: 427-439. In some embodiments, the retrotransposase comprises a sequence having at least about 70% identity to any one of SEQ ID NOs: 427-439. In some embodiments, the retrotransposase comprises a sequence having at least about 75% identity to any one of SEQ ID NOs: 427-439. In some embodiments, the retrotransposase comprises a sequence having at least about 80% identity to any one of SEQ ID NOs: 427-439. In some embodiments, the retrotransposase comprises a sequence having at least about 85% identity to any one of SEQ ID NOs: 427-439. In some embodiments, the retrotransposase comprises a sequence having at least about 90% identity to any one of SEQ ID NOs: 427-439. In some embodiments, the retrotransposase comprises a sequence having at least about 95% identity to any one of SEQ ID NOs: 427-439. In some embodiments, the retrotransposase comprises a sequence having at least about 96% identity to any one of SEQ ID NOs: 427-439. In some embodiments, the retrotransposase comprises a sequence having at least about 97% identity to any one of SEQ ID NOs: 427-439. In some embodiments, the retrotransposase comprises a sequence having at least about 98% identity to any one of SEQ ID NOs: 427-439. In some embodiments, the retrotransposase comprises a sequence having at least about 99% identity to any one of SEQ ID NOs: 427-439. In some embodiments, the retrotransposase comprises a sequence having 100% identity to any one of SEQ ID NOs: 427-439.

[0350] In some embodiments, the retrotransposase is a MG151 retrotransposase (i.e., SEQ ID NOs: 440-554 and 1020-1037). In some embodiments, the retrotransposase comprises a sequence having at least about 20%, at least about 25%, at least about 30%, at least about 35%, at least about 40%, at least about 45%, at least about 50%, at least about 55%, at least about 60%, at least about 65%, at least about 70%, at least about 75%, at least about 80%, at least about 85%, at least about 90%, at least about 91%, at least about 92%, at least about 93%, at least about 94%, at least about 95%, at least about 96%, at least about 97%, at least about 98%, or at least about 99% sequence identity to any one of SEQ ID NOs: 440-554 and 1020-1037. In some embodiments, the retrotransposase comprises a sequence having at least about 70% identity to any one of SEQ ID NOs: 440-554 and 1020-1037. In some embodiments, the retrotransposase comprises a sequence having at least about 75% identity to any one of SEQ ID NOs: 440-554 and 1020-1037. In some embodiments, the retrotransposase comprises a sequence having at least about 80% identity to any one of SEQ ID NOs: 440-554 and 1020-1037. In some embodiments, the retrotransposase comprises a sequence having at least about 85% identity to any one of SEQ ID NOs: 440-554 and 1020-1037. In some embodiments, the retrotransposase comprises a sequence having at least about 90% identity to any one of SEQ ID NOs: 440-554 and 1020-1037. In some embodiments, the retrotransposase comprises a sequence having at least about 95% identity to any one of SEQ ID NOs: 440-554 and 1020-1037. In some embodiments, the retrotransposase comprises a sequence having at least about 96% identity to any one of SEQ ID NOs: 440-554 and 1020-1037. In some embodiments, the retrotransposase comprises a sequence having at least about 97% identity to any one of SEQ ID NOs: 440-554 and 1020-1037. In some embodiments, the retrotransposase comprises a sequence having at least about 98% identity to any one of SEQ ID NOs: 440-554 and 1020-1037. In some embodiments, the retrotransposase comprises a sequence having at least about 99% identity to any one of SEQ ID NOs: 440-554 and 1020-1037. In some embodiments, the retrotransposase comprises a sequence having 100% identity to any one of SEQ ID NOs: 440-554 and 1020-1037.

[0351] In some embodiments, the retrotransposase is a MG153 retrotransposase (i.e., SEQ ID NOs: 555-608 and 1927-2010). In some embodiments, the retrotransposase comprises a sequence having at least about 20%, at least about 25%, at least about 30%, at least about 35%, at least about 40%, at least about 45%, at least about 50%, at least about 55%, at least about 60%, at least about 65%, at least about 70%, at least about 75%, at least about 80%, at least about 85%, at least about 90%, at least about 91%, at least about 92%, at least about 93%, at least about 94%, at least about 95%, at least about 96%, at least about 97%, at least about 98%, or at least about 99% sequence identity to any one of SEQ ID NOs: 555-608 and 1927-2010. In some embodiments, the retrotransposase comprises a sequence having at least about 70% identity to any one of SEQ ID NOs: 555-608 and 1927-2010. In some embodiments, the retrotransposase comprises a sequence having at least about 75% identity to any one of SEQ ID NOs: 555-608 and 1927-2010. In some embodiments, the retrotransposase comprises a sequence having at least about 80% identity to any one of SEQ ID NOs: 555-608 and 1927-2010. In some embodiments, the retrotransposase comprises a sequence having at least about 85% identity to any one of SEQ ID NOs: 555-608 and 1927-2010. In some embodiments, the retrotransposase comprises a sequence having at least about 90% identity to any one of SEQ ID NOs: 555-608 and 1927-2010. In some embodiments, the retrotransposase comprises a sequence having at least about 95% identity to any one of SEQ ID NOs: 555-608 and 1927-2010. In some embodiments, the retrotransposase comprises a sequence having at least about 96% identity to any one of SEQ ID NOs: 555-608 and 1927-2010. In some embodiments, the retrotransposase comprises a sequence having at least about 97% identity to any one of SEQ ID NOs: 555-608 and 1927-2010. In some embodiments, the retrotransposase comprises a sequence having at least about 98% identity to any one of SEQ ID NOs: 555-608 and 1927-2010. In some embodiments, the retrotransposase comprises a sequence having at least about 99% identity to any one of SEQ ID NOs: 555-608 and 1927-2010. In some embodiments, the retrotransposase comprises a sequence having 100% identity to any one of SEQ ID NOs: 555-608 and 1927-2010.

[0352] In some embodiments, the retrotransposase is a MG154 retrotransposase (i.e., SEQ ID NOs: 609-610 and 1555). In some embodiments, the retrotransposase comprises a sequence having at least about 20%, at least about 25%, at least about 30%, at least about 35%, at least about 40%, at least about 45%, at least about 50%, at least about 55%, at least about 60%, at least about 65%, at least about 70%, at least about 75%, at least about 80%, at least about 85%, at least about 90%, at least about 91%, at least about 92%, at least about 93%, at least about 94%, at least about 95%, at least about 96%, at least about 97%, at least about 98%, or at least about 99% sequence identity to any one of SEQ ID NOs: 609-610 and 1555. In some embodiments, the retrotransposase comprises a sequence having at least about 70% identity to any one of SEQ ID NOs: 609-610 and 1555. In some embodiments, the retrotransposase comprises a sequence having at least about 75% identity to any one of SEQ ID NOs: 609-610 and 1555. In some embodiments, the retrotransposase comprises a sequence having at least about 80% identity to any one of SEQ ID NOs: 609-610 and 1555. In some embodiments, the retrotransposase comprises a sequence having at least about 85% identity to any one of SEQ ID NOs: 609-610 and 1555. In some embodiments, the retrotransposase comprises a sequence having at least about 90% identity to any one of SEQ ID NOs: 609-610 and 1555. In some embodiments, the retrotransposase comprises a sequence having at least about 95% identity to any one of SEQ ID NOs: 609-610 and 1555. In some embodiments, the retrotransposase comprises a sequence having at least about 96% identity to any one of SEQ ID NOs: 609-610 and 1555. In some embodiments, the retrotransposase comprises a sequence having at least about 97% identity to any one of SEQ ID NOs: 609-610 and 1555. In some embodiments, the retrotransposase comprises a sequence having at least about 98% identity to any one of SEQ ID NOs: 609-610 and 1555. In some embodiments, the retrotransposase comprises a sequence having at least about 99% identity to any one of SEQ ID NOs: 609-610 and 1555. In some embodiments, the retrotransposase comprises a sequence having 100% identity to any one of SEQ ID NOs: 609-610 and 1555.

[0353] In some embodiments, the retrotransposase is a MG155 retrotransposase (i.e., SEQ ID NOs: 611-615 and 1544-1545). In some embodiments, the retrotransposase comprises a sequence having at least about 20%, at least about 25%, at least about 30%, at least about 35%, at least about 40%, at least about 45%, at least about 50%, at least about 55%, at least about 60%, at least about 65%, at least about 70%, at least about 75%, at least about 80%, at least about 85%, at least about 90%, at least about 91%, at least about 92%, at least about 93%, at least about 94%, at least about 95%, at least about 96%, at least about 97%, at least about 98%, or at least about 99% sequence identity to any one of SEQ ID NOs: 611-615 and 1544-1545. In some embodiments, the retrotransposase comprises a sequence having at least about 70% identity to any one of SEQ ID NOs: 611-615 and 1544-1545. In some embodiments, the retrotransposase comprises a sequence having at least about 75% identity to any one of SEQ ID NOs: 611-615 and 1544-1545. In some embodiments, the retrotransposase comprises a sequence having at least about 80% identity to any one of SEQ ID NOs: 611-615 and 1544-1545. In some embodiments, the retrotransposase comprises a sequence having at least about 85% identity to any one of SEQ ID NOs: 611-615 and 1544-1545. In some embodiments, the retrotransposase comprises a sequence having at least about 90% identity to any one of SEQ ID NOs: 611-615 and 1544-1545. In some embodiments, the retrotransposase comprises a sequence having at least about 95% identity to any one of SEQ ID NOs: 611-615 and 1544-1545. In some embodiments, the retrotransposase comprises a sequence having at least about 96% identity to any one of SEQ ID NOs: 611-615 and 1544-1545. In some embodiments, the retrotransposase comprises a sequence having at least about 97% identity to any one of SEQ ID NOs: 611-615 and 1544-1545. In some embodiments, the retrotransposase comprises a sequence having at least about 98% identity to any one of SEQ ID NOs: 611-615 and 1544-1545. In some embodiments, the retrotransposase comprises a sequence having at least about 99% identity to any one of SEQ ID NOs: 611-615 and 1544-1545. In some embodiments, the retrotransposase comprises a sequence having 100% identity to any one of SEQ ID NOs: 611-615 and 1544-1545.

[0354] In some embodiments, the retrotransposase is a MG156 retrotransposase (i.e., SEQ ID NO: 616 or SEQ ID NO: 617). In some embodiments, the retrotransposase comprises a sequence having at least about 20%, at least about 25%, at least about 30%, at least about 35%, at least about 40%, at least about 45%, at least about 50%, at least about 55%, at least about 60%, at least about 65%, at least about 70%, at least about 75%, at least about 80%, at least about 85%, at least about 90%, at least about 91%, at least about 92%, at least about 93%, at least about 94%, at least about 95%, at least about 96%, at least about 97%, at least about 98%, or at least about 99% sequence identity to SEQ ID NO: 616 or SEQ ID NO: 617. In some embodiments, the retrotransposase comprises a sequence having at least about 70% identity to SEQ ID NO: 616 or SEQ ID NO: 617. In some embodiments, the retrotransposase comprises a sequence having at least about 75% identity to SEQ ID NO: 616 or SEQ ID NO: 617. In some embodiments, the retrotransposase comprises a sequence having at least about 80% identity to SEQ ID NO: 616 or SEQ ID NO: 617. In some embodiments, the retrotransposase comprises a sequence having at least about 85% identity to SEQ ID NO: 616 or SEQ ID NO: 617. In some embodiments, the retrotransposase comprises a sequence having at least about 90% identity to SEQ ID NO: 616 or SEQ ID NO: 617. In some embodiments, the retrotransposase comprises a sequence having at least about 95% identity to SEQ ID NO: 616 or SEQ ID NO: 617. In some embodiments, the retrotransposase comprises a sequence having at least about 96% identity to SEQ ID NO: 616 or SEQ ID NO: 617. In some embodiments, the retrotransposase comprises a sequence having at least about 97% identity to SEQ ID NO: 616 or SEQ ID NO: 617. In some embodiments, the retrotransposase comprises a sequence having at least about 98% identity to SEQ ID NO: 616 or SEQ ID NO: 617. In some embodiments, the retrotransposase comprises a sequence having at least about 99% identity to SEQ ID NO: 616 or SEQ ID NO: 617. In some embodiments, the retrotransposase comprises a sequence having 100% identity to SEQ ID NO: 616 or SEQ ID NO: 617.

[0355] In some embodiments, the retrotransposase is a MG157 retrotransposase (i.e., SEQ ID NOs: 618-622 and 2258-2266). In some embodiments, the retrotransposase comprises a sequence having at least about 20%, at least about 25%, at least about 30%, at least about 35%, at least about 40%, at least about 45%, at least about 50%, at least about 55%, at least about 60%, at least about 65%, at least about 70%, at least about 75%, at least about 80%, at least about 85%, at least about 90%, at least about 91%, at least about 92%, at least about 93%, at least about 94%, at least about 95%, at least about 96%, at least about 97%, at least about 98%, or at least about 99% sequence identity to any one of SEQ ID NOs: 618-622 and 2258-2266. In some embodiments, the retrotransposase comprises a sequence having at least about 70% identity to any one of SEQ ID NOs: 618-622 and 2258-2266. In some embodiments, the retrotransposase comprises a sequence having at least about 75% identity to any one of SEQ ID NOs: 618-622 and 2258-2266. In some embodiments, the retrotransposase comprises a sequence having at least about 80% identity to any one of SEQ ID NOs: 618-622 and 2258-2266. In some embodiments, the retrotransposase comprises a sequence having at least about 85% identity to any one of SEQ ID NOs: 618-622 and 2258-2266. In some embodiments, the retrotransposase comprises a sequence having at least about 90% identity to any one of SEQ ID NOs: 618-622 and 2258-2266. In some embodiments, the retrotransposase comprises a sequence having at least about 95% identity to any one of SEQ ID NOs: 618-622 and 2258-2266. In some embodiments, the retrotransposase comprises a sequence having at least about 96% identity to any one of SEQ ID NOs: 618-622 and 2258-2266. In some embodiments, the retrotransposase comprises a sequence having at least about 97% identity to any one of SEQ ID NOs: 618-622 and 2258-2266. In some embodiments, the retrotransposase comprises a sequence having at least about 98% identity to any one of SEQ ID NOs: 618-622 and 2258-2266. In some embodiments, the retrotransposase comprises a sequence having at least about 99% identity to any one of SEQ ID NOs: 618-622 and 2258-2266. In some embodiments, the retrotransposase comprises a sequence having 100% identity to any one of SEQ ID NOs: 618-622 and 2258-2266.

[0356] In some embodiments, the retrotransposase is a MG158 retrotransposase (i.e., SEQ ID NO: 623). In some embodiments, the retrotransposase comprises a sequence having at least about 20%, at least about 25%, at least about 30%, at least about 35%, at least about 40%, at least about 45%, at least about 50%, at least about 55%, at least about 60%, at least about 65%, at least about 70%, at least about 75%, at least about 80%, at least about 85%, at least about 90%, at least about 91%, at least about 92%, at least about 93%, at least about 94%, at least about 95%, at least about 96%, at least about 97%, at least about 98%, or at least about 99% sequence identity to SEQ ID NO: 623. In some embodiments, the retrotransposase comprises a sequence having at least about 70% identity to SEQ ID NO: 623. In some embodiments, the retrotransposase comprises a sequence having at least about 75% identity to SEQ ID NO: 623. In some embodiments, the retrotransposase comprises a sequence having at least about 80% identity to SEQ ID NO: 623. In some embodiments, the retrotransposase comprises a sequence having at least about 85% identity to SEQ ID NO: 623. In some embodiments, the retrotransposase comprises a sequence having at least about 90% identity to SEQ ID NO: 623. In some embodiments, the retrotransposase comprises a sequence having at least about 95% identity to SEQ ID NO: 623. In some embodiments, the retrotransposase comprises a sequence having at least about 96% identity to SEQ ID NO: 623. In some embodiments, the retrotransposase comprises a sequence having at least about 97% identity to SEQ ID NO: 623. In some embodiments, the retrotransposase comprises a sequence having at least about 98% identity to SEQ ID NO: 623. In some embodiments, the retrotransposase comprises a sequence having at least about 99% identity to SEQ ID NO: 623. In some embodiments, the retrotransposase comprises a sequence having 100% identity to SEQ ID NO: 623.

[0357] In some embodiments, the retrotransposase is a MG159 retrotransposase (i.e., SEQ ID NOs: 624-626). In some embodiments, the retrotransposase comprises a sequence having at least about 20%, at least about 25%, at least about 30%, at least about 35%, at least about 40%, at least about 45%, at least about 50%, at least about 55%, at least about 60%, at least about 65%, at least about 70%, at least about 75%, at least about 80%, at least about 85%, at least about 90%, at least about 91%, at least about 92%, at least about 93%, at least about 94%, at least about 95%, at least about 96%, at least about 97%, at least about 98%, or at least about 99% sequence identity to any one of SEQ ID NOs: 624-626. In some embodiments, the retrotransposase comprises a sequence having at least about 70% identity to any one of SEQ ID NOs: 624-626. In some embodiments, the retrotransposase comprises a sequence having at least about 75% identity to any one of SEQ ID NOs: 624-626. In some embodiments, the retrotransposase comprises a sequence having at least about 80% identity to any one of SEQ ID NOs: 624-626. In some embodiments, the retrotransposase comprises a sequence having at least about 85% identity to any one of SEQ ID NOs: 624-626. In some embodiments, the retrotransposase comprises a sequence having at least about 90% identity to any one of SEQ ID NOs: 624-626. In some embodiments, the retrotransposase comprises a sequence having at least about 95% identity to any one of SEQ ID NOs: 624-626. In some embodiments, the retrotransposase comprises a sequence having at least about 96% identity to any one of SEQ ID NOs: 624-626. In some embodiments, the retrotransposase comprises a sequence having at least about 97% identity to any one of SEQ ID NOs: 624-626. In some embodiments, the retrotransposase comprises a sequence having at least about 98% identity to any one of SEQ ID NOs: 624-626. In some embodiments, the retrotransposase comprises a sequence having at least about 99% identity to any one of SEQ ID NOs: 624-626. In some embodiments, the retrotransposase comprises a sequence having 100% identity to any one of SEQ ID NOs: 624-626.

[0358] In some embodiments, the retrotransposase is a MG160 retrotransposase (i.e., SEQ ID NOs: 627-673, and 1039-1475, and 2011-2026). In some embodiments, the retrotransposase comprises a sequence having at least about 20%, at least about 25%, at least about 30%, at least about 35%, at least about 40%, at least about 45%, at least about 50%, at least about 55%, at least about 60%, at least about 65%, at least about 70%, at least about 75%, at least about 80%, at least about 85%, at least about 90%, at least about 91%, at least about 92%, at least about 93%, at least about 94%, at least about 95%, at least about 96%, at least about 97%, at least about 98%, or at least about 99% sequence identity to any one of SEQ ID NOs: 627-673, and 1039-1475, and 2011-2026. In some embodiments, the retrotransposase comprises a sequence having at least about 70% identity to any one of SEQ ID NOs: 627-673, and 1039-1475, and 2011-2026. In some embodiments, the retrotransposase comprises a sequence having at least about 75% identity to any one of SEQ ID NOs: 627-673, and 1039-1475, and 2011-2026. In some embodiments, the retrotransposase comprises a sequence having at least about 80% identity to any one of SEQ ID NOs: 627-673, and 1039-1475, and 2011-2026. In some embodiments, the retrotransposase comprises a sequence having at least about 85% identity to any one of SEQ ID NOs: 627-673, and 1039-1475, and 2011-2026. In some embodiments, the retrotransposase comprises a sequence having at least about 90% identity to any one of SEQ ID NOs: 627-673, and 1039-1475, and 2011-2026. In some embodiments, the retrotransposase comprises a sequence having at least about 95% identity to any one of SEQ ID NOs: 627-673, and 1039-1475, and 2011-2026. In some embodiments, the retrotransposase comprises a sequence having at least about 96% identity to any one of SEQ ID NOs: 627-673, and 1039-1475, and 2011-2026. In some embodiments, the retrotransposase comprises a sequence having at least about 97% identity to any one of SEQ ID NOs: 627-673, and 1039-1475, and 2011-2026. In some embodiments, the retrotransposase comprises a sequence having at least about 98% identity to any one of SEQ ID NOs: 627-673, and 1039-1475, and 2011-2026. In some embodiments, the retrotransposase comprises a sequence having at least about 99% identity to any one of SEQ ID NOs: 627-673, and 1039-1475, and 2011-2026. In some embodiments, the retrotransposase comprises a sequence having 100% identity to any one of SEQ ID NOs: 627-673, and 1039-1475, and 2011-2026.

[0359] In some embodiments, the retrotransposase is a MG163 retrotransposase (i.e., SEQ ID NOs: 674-678). In some embodiments, the retrotransposase comprises a sequence having at least about 20%, at least about 25%, at least about 30%, at least about 35%, at least about 40%, at least about 45%, at least about 50%, at least about 55%, at least about 60%, at least about 65%, at least about 70%, at least about 75%, at least about 80%, at least about 85%, at least about 90%, at least about 91%, at least about 92%, at least about 93%, at least about 94%, at least about 95%, at least about 96%, at least about 97%, at least about 98%, or at least about 99% sequence identity to any one of SEQ ID NOs: 674-678. In some embodiments, the retrotransposase comprises a sequence having at least about 70% identity to any one of SEQ ID NOs: 674-678. In some embodiments, the retrotransposase comprises a sequence having at least about 75% identity to any one of SEQ ID NOs: 674-678. In some embodiments, the retrotransposase comprises a sequence having at least about 80% identity to any one of SEQ ID NOs: 674-678. In some embodiments, the retrotransposase comprises a sequence having at least about 85% identity to any one of SEQ ID NOs: 674-678. In some embodiments, the retrotransposase comprises a sequence having at least about 90% identity to any one of SEQ ID NOs: 674-678. In some embodiments, the retrotransposase comprises a sequence having at least about 95% identity to any one of SEQ ID NOs: 674-678. In some embodiments, the retrotransposase comprises a sequence having at least about 96% identity to any one of SEQ ID NOs: 674-678. In some embodiments, the retrotransposase comprises a sequence having at least about 97% identity to any one of SEQ ID NOs: 674-678. In some embodiments, the retrotransposase comprises a sequence having at least about 98% identity to any one of SEQ ID NOs: 674-678. In some embodiments, the retrotransposase comprises a sequence having at least about 99% identity to any one of SEQ ID NOs: 674-678. In some embodiments, the retrotransposase comprises a sequence having 100% identity to any one of SEQ ID NOs: 674-678.

[0360] In some embodiments, the retrotransposase is a MG164 retrotransposase (i.e., SEQ ID NOs: 679-683). In some embodiments, the retrotransposase comprises a sequence having at least about 20%, at least about 25%, at least about 30%, at least about 35%, at least about 40%, at least about 45%, at least about 50%, at least about 55%, at least about 60%, at least about 65%, at least about 70%, at least about 75%, at least about 80%, at least about 85%, at least about 90%, at least about 91%, at least about 92%, at least about 93%, at least about 94%, at least about 95%, at least about 96%, at least about 97%, at least about 98%, or at least about 99% sequence identity to any one of SEQ ID NOs: 679-683. In some embodiments, the retrotransposase comprises a sequence having at least about 70% identity to any one of SEQ ID NOs: 679-683. In some embodiments, the retrotransposase comprises a sequence having at least about 75% identity to any one of SEQ ID NOs: 679-683. In some embodiments, the retrotransposase comprises a sequence having at least about 80% identity to any one of SEQ ID NOs: 679-683. In some embodiments, the retrotransposase comprises a sequence having at least about 85% identity to any one of SEQ ID NOs: 679-683. In some embodiments, the retrotransposase comprises a sequence having at least about 90% identity to any one of SEQ ID NOs: 679-683. In some embodiments, the retrotransposase comprises a sequence having at least about 95% identity to any one of SEQ ID NOs: 679-683. In some embodiments, the retrotransposase comprises a sequence having at least about 96% identity to any one of SEQ ID NOs: 679-683. In some embodiments, the retrotransposase comprises a sequence having at least about 97% identity to any one of SEQ ID NOs: 679-683. In some embodiments, the retrotransposase comprises a sequence having at least about 98% identity to any one of SEQ ID NOs: 679-683. In some embodiments, the retrotransposase comprises a sequence having at least about 99% identity to any one of SEQ ID NOs: 679-683. In some embodiments, the retrotransposase comprises a sequence having 100% identity to any one of SEQ ID NOs: 679-683.

[0361] In some embodiments, the retrotransposase is a MG165 retrotransposase (i.e., SEQ ID NOs: 684-692 and 2027-2046). In some embodiments, the retrotransposase comprises a sequence having at least about 20%, at least about 25%, at least about 30%, at least about 35%, at least about 40%, at least about 45%, at least about 50%, at least about 55%, at least about 60%, at least about 65%, at least about 70%, at least about 75%, at least about 80%, at least about 85%, at least about 90%, at least about 91%, at least about 92%, at least about 93%, at least about 94%, at least about 95%, at least about 96%, at least about 97%, at least about 98%, or at least about 99% sequence identity to any one of SEQ ID NOs: 684-692 and 2027-2046. In some embodiments, the retrotransposase comprises a sequence having at least about 70% identity to any one of SEQ ID NOs: 684-692 and 2027-2046. In some embodiments, the retrotransposase comprises a sequence having at least about 75% identity to any one of SEQ ID NOs: 684-692 and 2027-2046. In some embodiments, the retrotransposase comprises a sequence having at least about 80% identity to any one of SEQ ID NOs: 684-692 and 2027-2046. In some embodiments, the retrotransposase comprises a sequence having at least about 85% identity to any one of SEQ ID NOs: 684-692 and 2027-2046. In some embodiments, the retrotransposase comprises a sequence having at least about 90% identity to any one of SEQ ID NOs: 684-692 and 2027-2046. In some embodiments, the retrotransposase comprises a sequence having at least about 95% identity to any one of SEQ ID NOs: 684-692 and 2027-2046. In some embodiments, the retrotransposase comprises a sequence having at least about 96% identity to any one of SEQ ID NOs: 684-692 and 2027-2046. In some embodiments, the retrotransposase comprises a sequence having at least about 97% identity to any one of SEQ ID NOs: 684-692 and 2027-2046. In some embodiments, the retrotransposase comprises a sequence having at least about 98% identity to any one of SEQ ID NOs: 684-692 and 2027-2046. In some embodiments, the retrotransposase comprises a sequence having at least about 99% identity to any one of SEQ ID NOs: 684-692 and 2027-2046. In some embodiments, the retrotransposase comprises a sequence having 100% identity to any one of SEQ ID NOs: 684-692 and 2027-2046.

[0362] In some embodiments, the retrotransposase is a MG166 retrotransposase (i.e., SEQ ID NOs: 693-697 and 2047-2090). In some embodiments, the retrotransposase comprises a sequence having at least about 20%, at least about 25%, at least about 30%, at least about 35%, at least about 40%, at least about 45%, at least about 50%, at least about 55%, at least about 60%, at least about 65%, at least about 70%, at least about 75%, at least about 80%, at least about 85%, at least about 90%, at least about 91%, at least about 92%, at least about 93%, at least about 94%, at least about 95%, at least about 96%, at least about 97%, at least about 98%, or at least about 99% sequence identity to any one of SEQ ID NOs: 693-697 and 2047-2090. In some embodiments, the retrotransposase comprises a sequence having at least about 70% identity to any one of SEQ ID NOs: 693-697 and 2047-2090. In some embodiments, the retrotransposase comprises a sequence having at least about 75% identity to any one of SEQ ID NOs: 693-697 and 2047-2090. In some embodiments, the retrotransposase comprises a sequence having at least about 80% identity to any one of SEQ ID NOs: 693-697 and 2047-2090. In some embodiments, the retrotransposase comprises a sequence having at least about 85% identity to any one of SEQ ID NOs: 693-697 and 2047-2090. In some embodiments, the retrotransposase comprises a sequence having at least about 90% identity to any one of SEQ ID NOs: 693-697 and 2047-2090. In some embodiments, the retrotransposase comprises a sequence having at least about 95% identity to any one of SEQ ID NOs: 693-697 and 2047-2090. In some embodiments, the retrotransposase comprises a sequence having at least about 96% identity to any one of SEQ ID NOs: 693-697 and 2047-2090. In some embodiments, the retrotransposase comprises a sequence having at least about 97% identity to any one of SEQ ID NOs: 693-697 and 2047-2090. In some embodiments, the retrotransposase comprises a sequence having at least about 98% identity to any one of SEQ ID NOs: 693-697 and 2047-2090. In some embodiments, the retrotransposase comprises a sequence having at least about 99% identity to any one of SEQ ID NOs: 693-697 and 2047-2090. In some embodiments, the retrotransposase comprises a sequence having 100% identity to any one of SEQ ID NOs: 693-697 and 2047-2090.

[0363] In some embodiments, the retrotransposase is a MG167 retrotransposase (i.e., SEQ ID NOs: 698-702 and 2091-2119). In some embodiments, the retrotransposase comprises a sequence having at least about 20%, at least about 25%, at least about 30%, at least about 35%, at least about 40%, at least about 45%, at least about 50%, at least about 55%, at least about 60%, at least about 65%, at least about 70%, at least about 75%, at least about 80%, at least about 85%, at least about 90%, at least about 91%, at least about 92%, at least about 93%, at least about 94%, at least about 95%, at least about 96%, at least about 97%, at least about 98%, or at least about 99% sequence identity to any one of SEQ ID NOs: 698-702 and 2091-2119. In some embodiments, the retrotransposase comprises a sequence having at least about 70% identity to any one of SEQ ID NOs: 698-702 and 2091-2119. In some embodiments, the retrotransposase comprises a sequence having at least about 75% identity to any one of SEQ ID NOs: 698-702 and 2091-2119. In some embodiments, the retrotransposase comprises a sequence having at least about 80% identity to any one of SEQ ID NOs: 698-702 and 2091-2119. In some embodiments, the retrotransposase comprises a sequence having at least about 85% identity to any one of SEQ ID NOs: 698-702 and 2091-2119. In some embodiments, the retrotransposase comprises a sequence having at least about 90% identity to any one of SEQ ID NOs: 698-702 and 2091-2119. In some embodiments, the retrotransposase comprises a sequence having at least about 95% identity to any one of SEQ ID NOs: 698-702 and 2091-2119. In some embodiments, the retrotransposase comprises a sequence having at least about 96% identity to any one of SEQ ID NOs: 698-702 and 2091-2119. In some embodiments, the retrotransposase comprises a sequence having at least about 97% identity to any one of SEQ ID NOs: 698-702 and 2091-2119. In some embodiments, the retrotransposase comprises a sequence having at least about 98% identity to any one of SEQ ID NOs: 698-702 and 2091-2119. In some embodiments, the retrotransposase comprises a sequence having at least about 99% identity to any one of SEQ ID NOs: 698-702 and 2091-2119. In some embodiments, the retrotransposase comprises a sequence having 100% identity to any one of SEQ ID NOs: 698-702 and 2091-2119.

[0364] In some embodiments, the retrotransposase is a MG168 retrotransposase (i.e., SEQ ID NOs: 703-707). In some embodiments, the retrotransposase comprises a sequence having at least about 20%, at least about 25%, at least about 30%, at least about 35%, at least about 40%, at least about 45%, at least about 50%, at least about 55%, at least about 60%, at least about 65%, at least about 70%, at least about 75%, at least about 80%, at least about 85%, at least about 90%, at least about 91%, at least about 92%, at least about 93%, at least about 94%, at least about 95%, at least about 96%, at least about 97%, at least about 98%, or at least about 99% sequence identity to any one of SEQ ID NOs: 703-707. In some embodiments, the retrotransposase comprises a sequence having at least about 70% identity to any one of SEQ ID NOs: 703-707. In some embodiments, the retrotransposase comprises a sequence having at least about 75% identity to any one of SEQ ID NOs: 703-707. In some embodiments, the retrotransposase comprises a sequence having at least about 80% identity to any one of SEQ ID NOs: 703-707. In some embodiments, the retrotransposase comprises a sequence having at least about 85% identity to any one of SEQ ID NOs: 703-707. In some embodiments, the retrotransposase comprises a sequence having at least about 90% identity to any one of SEQ ID NOs: 703-707. In some embodiments, the retrotransposase comprises a sequence having at least about 95% identity to any one of SEQ ID NOs: 703-707. In some embodiments, the retrotransposase comprises a sequence having at least about 96% identity to any one of SEQ ID NOs: 703-707. In some embodiments, the retrotransposase comprises a sequence having at least about 97% identity to any one of SEQ ID NOs: 703-707. In some embodiments, the retrotransposase comprises a sequence having at least about 98% identity to any one of SEQ ID NOs: 703-707. In some embodiments, the retrotransposase comprises a sequence having at least about 99% identity to any one of SEQ ID NOs: 703-707. In some embodiments, the retrotransposase comprises a sequence having 100% identity to any one of SEQ ID NOs: 703-707.

[0365] In some embodiments, the retrotransposase is a MG169 retrotransposase (i.e., SEQ ID NOs: 708-718 and 2121-2159). In some embodiments, the retrotransposase comprises a sequence having at least about 20%, at least about 25%, at least about 30%, at least about 35%, at least about 40%, at least about 45%, at least about 50%, at least about 55%, at least about 60%, at least about 65%, at least about 70%, at least about 75%, at least about 80%, at least about 85%, at least about 90%, at least about 91%, at least about 92%, at least about 93%, at least about 94%, at least about 95%, at least about 96%, at least about 97%, at least about 98%, or at least about 99% sequence identity to any one of SEQ ID NOs: 708-718 and 2121-2159. In some embodiments, the retrotransposase comprises a sequence having at least about 70% identity to any one of SEQ ID NOs: 708-718 and 2121-2159. In some embodiments, the retrotransposase comprises a sequence having at least about 75% identity to any one of SEQ ID NOs: 708-718 and 2121-2159. In some embodiments, the retrotransposase comprises a sequence having at least about 80% identity to any one of SEQ ID NOs: 708-718 and 2121-2159. In some embodiments, the retrotransposase comprises a sequence having at least about 85% identity to any one of SEQ ID NOs: 708-718 and 2121-2159. In some embodiments, the retrotransposase comprises a sequence having at least about 90% identity to any one of SEQ ID NOs: 708-718 and 2121-2159. In some embodiments, the retrotransposase comprises a sequence having at least about 95% identity to any one of SEQ ID NOs: 708-718 and 2121-2159. In some embodiments, the retrotransposase comprises a sequence having at least about 96% identity to any one of SEQ ID NOs: 708-718 and 2121-2159. In some embodiments, the retrotransposase comprises a sequence having at least about 97% identity to any one of SEQ ID NOs: 708-718 and 2121-2159. In some embodiments, the retrotransposase comprises a sequence having at least about 98% identity to any one of SEQ ID NOs: 708-718 and 2121-2159. In some embodiments, the retrotransposase comprises a sequence having at least about 99% identity to any one of SEQ ID NOs: 708-718 and 2121-2159. In some embodiments, the retrotransposase comprises a sequence having 100% identity to any one of SEQ ID NOs: 708-718 and 2121-2159.

[0366] In some embodiments, the retrotransposase is a MG170 retrotransposase (i.e., SEQ ID NOs: 719-728). In some embodiments, the retrotransposase comprises a sequence having at least about 20%, at least about 25%, at least about 30%, at least about 35%, at least about 40%, at least about 45%, at least about 50%, at least about 55%, at least about 60%, at least about 65%, at least about 70%, at least about 75%, at least about 80%, at least about 85%, at least about 90%, at least about 91%, at least about 92%, at least about 93%, at least about 94%, at least about 95%, at least about 96%, at least about 97%, at least about 98%, or at least about 99% sequence identity to any one of SEQ ID NOs: 719-728. In some embodiments, the retrotransposase comprises a sequence having at least about 70% identity to any one of SEQ ID NOs: 719-728. In some embodiments, the retrotransposase comprises a sequence having at least about 75% identity to any one of SEQ ID NOs: 719-728. In some embodiments, the retrotransposase comprises a sequence having at least about 80% identity to any one of SEQ ID NOs: 719-728. In some embodiments, the retrotransposase comprises a sequence having at least about 85% identity to any one of SEQ ID NOs: 719-728. In some embodiments, the retrotransposase comprises a sequence having at least about 90% identity to any one of SEQ ID NOs: 719-728. In some embodiments, the retrotransposase comprises a sequence having at least about 95% identity to any one of SEQ ID NOs: 719-728. In some embodiments, the retrotransposase comprises a sequence having at least about 96% identity to any one of SEQ ID NOs: 719-728. In some embodiments, the retrotransposase comprises a sequence having at least about 97% identity to any one of SEQ ID NOs: 719-728. In some embodiments, the retrotransposase comprises a sequence having at least about 98% identity to any one of SEQ ID NOs: 719-728. In some embodiments, the retrotransposase comprises a sequence having at least about 99% identity to any one of SEQ ID NOs: 719-728. In some embodiments, the retrotransposase comprises a sequence having 100% identity to any one of SEQ ID NOs: 719-728.

[0367] In some embodiments, the retrotransposase is a MG172 retrotransposase (i.e., SEQ ID NOs: 729-733). In some embodiments, the retrotransposase comprises a sequence having at least about 20%, at least about 25%, at least about 30%, at least about 35%, at least about 40%, at least about 45%, at least about 50%, at least about 55%, at least about 60%, at least about 65%, at least about 70%, at least about 75%, at least about 80%, at least about 85%, at least about 90%, at least about 91%, at least about 92%, at least about 93%, at least about 94%, at least about 95%, at least about 96%, at least about 97%, at least about 98%, or at least about 99% sequence identity to any one of SEQ ID NOs: 729-733. In some embodiments, the retrotransposase comprises a sequence having at least about 70% identity to any one of SEQ ID NOs: 729-733. In some embodiments, the retrotransposase comprises a sequence having at least about 75% identity to any one of SEQ ID NOs: 729-733. In some embodiments, the retrotransposase comprises a sequence having at least about 80% identity to any one of SEQ ID NOs: 729-733. In some embodiments, the retrotransposase comprises a sequence having at least about 85% identity to any one of SEQ ID NOs: 729-733. In some embodiments, the retrotransposase comprises a sequence having at least about 90% identity to any one of SEQ ID NOs: 729-733. In some embodiments, the retrotransposase comprises a sequence having at least about 95% identity to any one of SEQ ID NOs: 729-733. In some embodiments, the retrotransposase comprises a sequence having at least about 96% identity to any one of SEQ ID NOs: 729-733. In some embodiments, the retrotransposase comprises a sequence having at least about 97% identity to any one of SEQ ID NOs: 729-733. In some embodiments, the retrotransposase comprises a sequence having at least about 98% identity to any one of SEQ ID NOs: 729-733. In some embodiments, the retrotransposase comprises a sequence having at least about 99% identity to any one of SEQ ID NOs: 729-733. In some embodiments, the retrotransposase comprises a sequence having 100% identity to any one of SEQ ID NOs: 729-733.

[0368] In some embodiments, the retrotransposase is a MG173 retrotransposase (i.e., SEQ ID NOs: 734-735 and 1546-1553). In some embodiments, the retrotransposase comprises a sequence having at least about 20%, at least about 25%, at least about 30%, at least about 35%, at least about 40%, at least about 45%, at least about 50%, at least about 55%, at least about 60%, at least about 65%, at least about 70%, at least about 75%, at least about 80%, at least about 85%, at least about 90%, at least about 91%, at least about 92%, at least about 93%, at least about 94%, at least about 95%, at least about 96%, at least about 97%, at least about 98%, or at least about 99% sequence identity to any one of SEQ ID NOs: 734-735 and 1546-1553. In some embodiments, the retrotransposase comprises a sequence having at least about 70% identity to any one of SEQ ID NOs: 734-735 and 1546-1553. In some embodiments, the retrotransposase comprises a sequence having at least about 75% identity to any one of SEQ ID NOs: 734-735 and 1546-1553. In some embodiments, the retrotransposase comprises a sequence having at least about 80% identity to any one of SEQ ID NOs: 734-735 and 1546-1553. In some embodiments, the retrotransposase comprises a sequence having at least about 85% identity to any one of SEQ ID NOs: 734-735 and 1546-1553. In some embodiments, the retrotransposase comprises a sequence having at least about 90% identity to any one of SEQ ID NOs: 734-735 and 1546-1553. In some embodiments, the retrotransposase comprises a sequence having at least about 95% identity to any one of SEQ ID NOs: 734-735 and 1546-1553. In some embodiments, the retrotransposase comprises a sequence having at least about 96% identity to any one of SEQ ID NOs: 734-735 and 1546-1553. In some embodiments, the retrotransposase comprises a sequence having at least about 97% identity to any one of SEQ ID NOs: 734-735 and 1546-1553. In some embodiments, the retrotransposase comprises a sequence having at least about 98% identity to any one of SEQ ID NOs: 734-735 and 1546-1553. In some embodiments, the retrotransposase comprises a sequence having at least about 99% identity to any one of SEQ ID NOs: 734-735 and 1546-1553. In some embodiments, the retrotransposase comprises a sequence having 100% identity to any one of SEQ ID NOs: 734-735 and 1546-1553.

[0369] In some embodiments, the retrotransposase is a MG176 retrotransposase (i.e., SEQ ID NO: 1038 or SEQ ID NO: 2160). In some embodiments, the retrotransposase comprises a sequence having at least about 20%, at least about 25%, at least about 30%, at least about 35%, at least about 40%, at least about 45%, at least about 50%, at least about 55%, at least about 60%, at least about 65%, at least about 70%, at least about 75%, at least about 80%, at least about 85%, at least about 90%, at least about 91%, at least about 92%, at least about 93%, at least about 94%, at least about 95%, at least about 96%, at least about 97%, at least about 98%, or at least about 99% sequence identity to SEQ ID NO: 1038 or SEQ ID NO: 2160. In some embodiments, the retrotransposase comprises a sequence having at least about 70% identity to SEQ ID NO: 1038 or SEQ ID NO: 2160. In some embodiments, the retrotransposase comprises a sequence having at least about 75% identity to SEQ ID NO: 1038 or SEQ ID NO: 2160. In some embodiments, the retrotransposase comprises a sequence having at least about 80% identity to SEQ ID NO: 1038 or SEQ ID NO: 2160. In some embodiments, the retrotransposase comprises a sequence having at least about 85% identity to SEQ ID NO: 1038 or SEQ ID NO: 2160. In some embodiments, the retrotransposase comprises a sequence having at least about 90% identity to SEQ ID NO: 1038 or SEQ ID NO: 2160. In some embodiments, the retrotransposase comprises a sequence having at least about 95% identity to SEQ ID NO: 1038 or SEQ ID NO: 2160. In some embodiments, the retrotransposase comprises a sequence having at least about 96% identity to SEQ ID NO: 1038 or SEQ ID NO: 2160. In some embodiments, the retrotransposase comprises a sequence having at least about 97% identity to SEQ ID NO: 1038 or SEQ ID NO: 2160. In some embodiments, the retrotransposase comprises a sequence having at least about 98% identity to SEQ ID NO: 1038 or SEQ ID NO: 2160. In some embodiments, the retrotransposase comprises a sequence having at least about 99% identity to SEQ ID NO: 1038 or SEQ ID NO: 2160. In some embodiments, the retrotransposase comprises a sequence having 100% identity to SEQ ID NO: 1038 or SEQ ID NO: 2160.

[0370] In some embodiments, the retrotransposase is a MG192 retrotransposase (i.e., SEQ ID NO: 1554). In some embodiments, the retrotransposase comprises a sequence having at least about 20%, at least about 25%, at least about 30%, at least about 35%, at least about 40%, at least about 45%, at least about 50%, at least about 55%, at least about 60%, at least about 65%, at least about 70%, at least about 75%, at least about 80%, at least about 85%, at least about 90%, at least about 91%, at least about 92%, at least about 93%, at least about 94%, at least about 95%, at least about 96%, at least about 97%, at least about 98%, or at least about 99% sequence identity to SEQ ID NO: 1554. In some embodiments, the retrotransposase comprises a sequence having at least about 70% identity to SEQ ID NO: 1554. In some embodiments, the retrotransposase comprises a sequence having at least about 75% identity to SEQ ID NO: 1554. In some embodiments, the retrotransposase comprises a sequence having at least about 80% identity to SEQ ID NO: 1554. In some embodiments, the retrotransposase comprises a sequence having at least about 85% identity to SEQ ID NO: 1554. In some embodiments, the retrotransposase comprises a sequence having at least about 90% identity to SEQ ID NO: 1554. In some embodiments, the retrotransposase comprises a sequence having at least about 95% identity to SEQ ID NO: 1554. In some embodiments, the retrotransposase comprises a sequence having at least about 96% identity to SEQ ID NO: 1554. In some embodiments, the retrotransposase comprises a sequence having at least about 97% identity to SEQ ID NO: 1554. In some embodiments, the retrotransposase comprises a sequence having at least about 98% identity to SEQ ID NO: 1554. In some embodiments, the retrotransposase comprises a sequence having at least about 99% identity to SEQ ID NO: 1554. In some embodiments, the retrotransposase comprises a sequence having 100% identity to SEQ ID NO: 1554.

[0371] In some embodiments, the retrotransposase is encoded by a nucleic acid sequence that is codon optimized. In some embodiments, the retrotransposase is encoded by a nucleic acid sequence that is codon optimized for expression in a mammalian cell. In some embodiments, the retrotransposase is encoded by a nucleic acid sequence having at least about 20%, at least about 25%, at least about 30%, at least about 35%, at least about 40%, at least about 45%, at least about 50%, at least about 55%, at least about 60%, at least about 65%, at least about 70%, at least about 75%, at least about 80%, at least about 85%, at least about 90%, at least about 91%, at least about 92%, at least about 93%, at least about 94%, at least about 95%, at least about 96%, at least about 97%, at least about 98%, or at least about 99% sequence identity with the nucleic acid sequence of any one of SEQ ID NOs: 120-173, 181-187, 193-197, 203-207, 217-225, 231-235, 241-245, 251-255, 267-277, 288-297, 303-307, 324-339, 964-981, 1003-1019, 1504-1520, 1521-1536, 1539-1543, 1556-1568, and 1611-1806. In some embodiments, the retrotransposase is encoded by a nucleic acid sequence having at least 70% sequence identity with the nucleic acid sequence of any one of SEQ ID NOs: 120-173, 181-187, 193-197, 203-207, 217-225, 231-235, 241-245, 251-255, 267-277, 288-297, 303-307, 324-339, 964-981, 1003-1019, 1504-1520, 1521-1536, 1539-1543, 1556-1568, and 1611-1806. In some embodiments, the retrotransposase is encoded by a nucleic acid sequence having at least 75% sequence identity with the nucleic acid sequence of any one of SEQ ID NOs: 120-173, 181-187, 193-197, 203-207, 217-225, 231-235, 241-245, 251-255, 267-277, 288-297, 303-307, 324-339, 964-981, 1003-1019, 1504-1520, 1521-1536, 1539-1543, 1556-1568, and 1611-1806. In some embodiments, the retrotransposase is encoded by a nucleic acid sequence having at least 80% sequence identity with the nucleic acid sequence of any one of SEQ ID NOs: 120-173, 181-187, 193-197, 203-207, 217-225, 231-235, 241-245, 251-255, 267-277, 288-297, 303-307, 324-339, 964-981, 1003-1019, 1504-1520, 1521-1536, 1539-1543, 1556-1568, and 1611-1806. In some embodiments, the retrotransposase is encoded by a nucleic acid sequence having at least 85% sequence identity with the nucleic acid sequence of any one of SEQ ID NOs: 120-173, 181-187, 193-197, 203-207, 217-225, 231-235, 241-245, 251-255, 267-277, 288-297, 303-307, 324-339, 964-981, 1003-1019, 1504-1520, 1521-1536, 1539-1543, 1556-1568, and 1611-1806. In some embodiments, the retrotransposase is encoded by a nucleic acid sequence having at least 90% sequence identity with the nucleic acid sequence of any one of SEQ ID NOs: 120-173, 181-187, 193-197, 203-207, 217-225, 231-235, 241-245, 251-255, 267-277, 288-297, 303-307, 324-339, 964-981, 1003-1019, 1504-1520, 1521-1536, 1539-1543, 1556-1568, and 1611-1806. In some embodiments, the retrotransposase is encoded by a nucleic acid sequence having at least 95% sequence identity with the nucleic acid sequence of any one of SEQ ID NOs: 120-173, 181-187, 193-197, 203-207, 217-225, 231-235, 241-245, 251-255, 267-277, 288-297, 303-307, 324-339, 964-981, 1003-1019, 1504-1520, 1521-1536, 1539-1543, 1556-1568. In some embodiments, the retrotransposase is encoded by a nucleic acid sequence having at least 96% sequence identity with the nucleic acid sequence of any one of SEQ ID NOs: 120-173, 181-187, 193-197, 203-207, 217-225, 231-235, 241-245, 251-255, 267-277, 288-297, 303-307, 324-339, 964-981, 1003-1019, 1504-1520, 1521-1536, 1539-1543, 1556-1568. In some embodiments, the retrotransposase is encoded by a nucleic acid sequence having at least 97% sequence identity with the nucleic acid sequence of any one of SEQ ID NOs: 120-173, 181-187, 193-197, 203-207, 217-225, 231-235, 241-245, 251-255, 267-277, 288-297, 303-307, 324-339, 964-981, 1003-1019, 1504-1520, 1521-1536, 1539-1543, 1556-1568, and 1611-1806. In some embodiments, the retrotransposase is encoded by a nucleic acid sequence having at least 98% sequence identity with the nucleic acid sequence of any one of SEQ ID NOs: 120-173, 181-187, 193-197, 203-207, 217-225, 231-235, 241-245, 251-255, 267-277, 288-297, 303-307, 324-339, 964-981, 1003-1019, 1504-1520, 1521-1536,1539-1543, 1556-1568, and 1611-1806. In some embodiments, the retrotransposase is encoded by a nucleic acid sequence having at least 99% sequence identity with the nucleic acid sequence of any one of SEQ ID NOs: 120-173, 181-187, 193-197, 203-207, 217-225, 231-235, 241-245, 251-255, 267-277, 288-297, 303-307, 324-339, 964-981, 1003-1019, 1504-1520, 1521-1536, 1539-1543, 1556-1568, and 1611-1806. In some embodiments, the retrotransposase is encoded by a nucleic acid sequence of any one of SEQ ID NOs: 120-173, 181-187, 193-197, 203-207, 217-225, 231-235, 241-245, 251-255, 267-277, 288-297, 303-307, 324-339, 964-981, 1003-1019, 1504-1520, 1521-1536, 1539-1543, 1556-1568, and 1611-1806.

[0372] In some embodiments, the retrotransposase comprises a reverse transcriptase domain. In some embodiments, the retrotransposase further comprises one or more zinc finger domains. In some embodiments, the retrotransposase further comprises an endonuclease finger domain. In some embodiments, the retrotransposase comprises a conserved catalytic D, QG, [Y/F]XDD, or LG motif. In some embodiments, the retrotransposase comprises a conserved CX_{[2-3]}C Zn finger motif.

[0373] In some embodiments, the retrotransposase has less than about 90%, less than about 85%, less than about 80%, less than about 75%, less than about 70%, less than about 65%, less than about 60%, less than about 55%, less than about 50%, less than about 45%, less than about 40%, less than about 35%, less than about 30%, less than about 25%, less than about 20%, less than about 15%, less than about 10%, or less than about 5% sequence identity to a documented retrotransposase.

[0374] In some embodiments, the cargo nucleotide sequence is flanked by a 3′ untranslated region (UTR) and a 5′ untranslated region (UTR).

[0375] In some embodiments, the retrotransposase is configured to transpose the cargo nucleotide sequence as single-stranded deoxyribonucleic acid polynucleotide. In some embodiments, the retrotransposase is configured to transpose the cargo nucleotide sequence as double-stranded deoxyribonucleic acid polynucleotide. In some embodiments, the retrotransposase is configured to transpose the cargo nucleotide sequence via a ribonucleic acid polynucleotide intermediate.

[0376] In some embodiments, the retrotransposase comprises one or more nuclear localization sequences (NLSs). In some embodiments, the NLS is proximal to the N- or C-terminus of the retrotransposase. In some embodiments, the NLS is appended N-terminal or C-terminal of the retrotransposase and comprise any one of SEQ ID NOs: 1477-1492, or having at least about 20%, at least about 25%, at least about 30%, at least about 35%, at least about 40%, at least about 45%, at least about 50%, at least about 55%, at least about 60%, at least about 65%, at least about 70%, at least about 75%, at least about 80%, at least about 85%, at least about 90%, at least about 91%, at least about 92%, at least about 93%, at least about 94%, at least about 95%, at least about 96%, at least about 97%, at least about 98%, or at least about 99% sequence identity to any one of SEQ ID NOs: 1477-1492. In some cases, the NLS comprises a sequence having at least about 80% identity to SEQ ID NOs: 1477-1492. In some cases, the NLS comprises a sequence having at least about 85% identity to SEQ ID NOs: 1477-1492. In some cases, the NLS comprises a sequence having at least about 90% identity to SEQ ID NOs: 1477-1492. In some cases, the NLS comprises a sequence having at least about 91% identity to SEQ ID NOs: 1477-1492. In some cases, the NLS comprises a sequence having at least about 92% identity to SEQ ID NOs: 1477-1492. In some cases, the NLS comprises a sequence having at least about 93% identity to SEQ ID NOs: 1477-1492. In some cases, the NLS comprises a sequence having at least about 94% identity to SEQ ID NOs: 1477-1492. In some cases, the NLS comprises a sequence having at least about 95% identity to SEQ ID NOs: 1477-1492. In some cases, the NLS comprises a sequence having at least about 96% identity to SEQ ID NOs: 1477-1492. In some cases, the NLS comprises a sequence having at least about 97% identity to SEQ ID NOs: 1477-1492. In some cases, the NLS comprises a sequence having at least about 98% identity to SEQ ID NOs: 1477-1492. In some cases, the NLS comprises a sequence having at least about 99% identity to SEQ ID NOs: 1477-1492. In some cases, the NLS comprises a sequence having 100% identity to SEQ ID NOs: 1477-1492. In some cases, the NLS comprises a sequence having 100% identity to SEQ ID NO: 1477. In some cases, the NLS comprises a sequence having 100% identity to SEQ ID NOs: 1478.

TABLE 1
Example NLS Sequences that may be used with
retrotransposases according to the disclosure

| | NLS amino | SEQ ID |
|---|---|---|
| Source | acid sequence | NO: |
| SV40 | PKKKRKV | 1477 |
| nucleoplasmin | KRPAATKKAGQAKKKK | 1478 |
| bipartite NLS | | |
| c-myc NLS | PAAKRVKLD | 1479 |
| c-myc NLS | RQRRNELKRSP | 1480 |
| hRNPA1 M9 NLS | NQSSNFGPMKGGNFGGRSSGP | 1481 |
| | YGGGGQYFAKPRNQGGY | |
| Importin-alpha | RMRIZFKNKGKDTAELRRRRV | 1482 |
| IBB domain | EVSVELRKAKKDEQILKRRNV | |
| Myoma T protein | VSRKRPRP | 1483 |
| Myoma T protein | PPKKARED | 1484 |
| p53 | PQPKKKPL | 1485 |
| mouse c-abl IV | SALIKKKKKMAP | 1486 |
| influenza virus | DRLRR | 1487 |
| NS1 | | |
| influenza virus | PKQKKRK | 1488 |
| NS1 | | |
| Hepatitis virus | RKLKKKIKKL | 1489 |
| delta antigen | | |
| mouse Mx1 protein | REKKKFLKRR | 1490 |
| human poly(ADP- | KRKGDEVDGVDEVAKKKSKK | 1491 |
| ribose) polymerase | | |
| steroid hormone | RKCLQAGMNLEARKTKK | 1492 |
| receptors (human) | | |
| glucocorticoid | | |

[0377] In some embodiments, the retrotransposase comprises a tag. In some embodiments, the tag is an affinity tag. Exemplary affinity tags include, but are not limited to, a His-tag, a Flag tag, a Myc-tag, an MBP-tag, and a GST-tag.

[0378] In some embodiments, the retrotransposase comprises a protease cleavage site. Exemplary protease cleavage sites include, but are not limited to, a TEV site, a C3 site, a Factor Xa site, and an Enterokinase site.

[0379] In some embodiments, the retrotransposase is tethered to a site directed nuclease. In some embodiments, the retrotransposase is fused to a site directed nuclease. In some embodiments, the retrotransposase is recruited to a site directed nuclease. In some embodiments, the site directed nuclease is an endonuclease. In some embodiments, the site directed nuclease is a Cas nuclease. In some embodiments, the Cas nuclease is an RNA guided CRISPR Cas9 nuclease. In some embodiments, the site directed nuclease is a dead nuclease or a nickase. In some embodiments, the site directed nuclease brings the retrotransposase into close proximity of a target site that is to be modified.

### Guide Nucleic Acids

[0380] In some embodiments, the retrotransposase system further comprises a site directed nuclease and a guide RNA (e.g., gRNA). In a polynucleotide when referring to a T, a T means U (Uracil) in RNA and T (Thymine) in DNA. In some embodiments, the retrotransposase systems described herein comprise a means for directing the site directed nuclease to a particular location in the target nucleic acid.

[0381] In some embodiments, the guide RNA comprises synthetic nucleotides or modified nucleotides. In some embodiments, the guide RNA comprises one or more inter-nucleoside linkers modified from the natural phosphodiester. In some embodiments, all of the inter-nucleoside linkers of the guide RNA, or contiguous nucleotide sequence thereof, are modified. For example, in some embodiments, the inter nucleoside linkage comprises Sulphur(S), such as a phosphorothioate inter-nucleoside linkage.

[0382] In some embodiments, the guide RNA comprises modifications to a ribose sugar or nucleobase. In some embodiments, the guide RNA comprises one or more nucleosides comprising a modified sugar moiety, wherein the modified sugar moiety is a modification of the sugar moiety when compared to the ribose sugar moiety found in deoxyribose nucleic acid (DNA) and RNA. In some embodiments, the modification is within the ribose ring structure. Exemplary modifications include, but are not limited to, replacement with a hexose ring (HNA), a bicyclic ring having a biradical bridge between the C2 and C4 carbons on the ribose ring (e.g., locked nucleic acids (LNA)), or an unlinked ribose ring which typically lacks a bond between the C2 and C3 carbons (e.g., UNA). In some embodiments, the sugar-modified nucleosides comprise bicyclohexose nucleic acids or tricyclic nucleic acids. In some embodiments, the modified nucleosides comprise nucleosides where the sugar moiety is replaced with a non-sugar moiety, for example peptide nucleic acids (PNA) or morpholino nucleic acids.

[0383] In some embodiments, the guide RNA comprises one or more modified sugars. In some embodiments, the sugar modifications comprise modifications made by altering the substituent groups on the ribose ring to groups other than hydrogen, or the 2′-OH group naturally found in DNA and RNA nucleosides. In some embodiments, substituents are introduced at the 2′, 3′, 4′, or 5′ positions, or combinations thereof. In some embodiments, nucleosides with modified sugar moieties comprise 2′ modified nucleosides, e.g., 2′ substituted nucleosides. A 2′ sugar modified nucleoside, in some embodiments, is a nucleoside that has a substituent other than —H or —OH at the 2′ position (2′ substituted nucleoside) or comprises a 2′ linked biradical, and comprises 2′ substituted nucleosides and LNA (2′-4′ biradical bridged) nucleosides. Examples of 2′-substituted modified nucleosides comprise, but are not limited to, 2′-O-alkyl-RNA, 2′-O-methyl-RNA, 2′-alkoxy-RNA, 2′-O-methoxyethyl-RNA (MOE), 2′-amino-DNA, 2′-Fluoro-RNA, and 2′-F-ANA nucleosides. In some embodiments, the modification in the ribose group comprises a modification at the 2′ position of the ribose group. In some embodiments, the modification at the 2′ position of the ribose group is selected from the group consisting of 2′-O-methyl, 2′-fluoro, 2′-deoxy, and 2′-O-(2-methoxyethyl).

[0384] In some embodiments, the guide RNA comprises one or more modified sugars. In some embodiments, the guide RNA comprises only modified sugars. In certain embodiments, the guide RNA comprises greater than about 10%, 25%, 50%, 75%, or 90% modified sugars. In some embodiments, the modified sugar is a bicyclic sugar. In some embodiments, the modified sugar comprises a 2′-O-methoxyethyl group. In some embodiments, the guide RNA comprises both inter-nucleoside linker modifications and nucleoside modifications.

[0385] In some cases, the guide RNA comprises a sequence complementary to a eukaryotic, fungal, plant, mammalian, or human genomic polynucleotide sequence. In some cases, the guide RNA comprises a sequence complementary to a eukaryotic genomic polynucleotide sequence. In some cases, the guide RNA comprises a sequence complementary to a fungal genomic polynucleotide sequence. In some cases, the guide RNA comprises a sequence complementary to a plant genomic polynucleotide sequence. In some cases, the guide RNA comprises a sequence complementary to a mammalian genomic polynucleotide sequence. In some cases, the guide RNA comprises a sequence complementary to a human genomic polynucleotide sequence.

[0386] In some cases, the guide RNA is 30-400 nucleotides in length. In some cases, the guide RNA is 85-245 nucleotides in length. In some cases, the guide RNA is more than 90 nucleotides in length. In some cases, the guide RNA is less than 245 nucleotides in length. In some embodiments, the guide RNA is 30, 40, 50, 60, 70, 80, 90, 100, 120, 140, 160, 180, 200, 220, 240, or more than 240 nucleotides in length. In some embodiments, the guide RNA is about 30 to about 40, about 30 to about 50, about 30 to about 60, about 30 to about 70, about 30 to about 80, about 30 to about 90, about 30 to about 100, about 30 to about 120, about 30 to about 140, about 30 to about 160, about 30 to about 180, about 30 to about 200, about 30 to about 220, about 30 to about 240, about 50 to about 60, about 50 to about 70, about 50 to about 80, about 50 to about 90, about 50 to about 100, about 50 to about 120, about 50 to about 140, about 50 to about 160, about 50 to about 180, about 50 to about 200, about 50 to about 220, about 50 to about 240, about 100 to about 120, about 100 to about 140, about 100 to about 160, about 100 to about 180, about 100 to about 200, about 100 to about 220, about 100 to about 240, about 160 to about 180, about 160 to about 200, about 160 to about 220, or about 160 to about 240 nucleotides in length.

[0387] In some embodiments, the gRNA is encoded by any one of the nucleic acid sequences of SEQ ID NOs: 903-926 and 934-951, a sequence having at least about 80%, 85%, 90%, 95%, 97%, 98%, or 99% sequence identity to any one of the nucleic acid sequences of SEQ ID NOs: 903-926 and 934-951, or a reverse complement thereof. In some embodiments, the guide RNA is encoded by a sequence having at least about 80% sequence identity to any one of the nucleic acid sequences of SEQ ID NOs: 903-926 and 934-951 or a reverse complement thereof. In some embodiments, the guide RNA is encoded by a sequence having at least about 85% sequence identity to any one of the nucleic acid sequences of SEQ ID NOs: 903-926 and 934-951 or a reverse complement thereof. In some embodiments, the guide RNA is encoded by a sequence having at least about 90% sequence identity to any one of the nucleic acid sequences of SEQ ID NOs: 903-926 and 934-951 or a reverse complement thereof. In some embodiments, the guide RNA is encoded by a sequence having at least about 95% sequence identity to any one of the nucleic acid sequences of SEQ ID NOs: 903-926 and 934-951 or a reverse complement thereof. In some embodiments, the guide RNA is encoded by a sequence having at least about 97% sequence identity to any one of the nucleic acid sequences of SEQ ID NOs: 903-926 and 934-951 or a reverse complement thereof. In some embodiments, the guide RNA is encoded by a sequence having at least about 98% sequence identity to any one of the nucleic acid sequences of SEQ ID NOs: 903-926 and 934-951 or a reverse complement thereof. In some embodiments, the guide RNA is encoded by a sequence having at least about 99% sequence identity to any one of the nucleic acid sequences of SEQ ID NOs: 903-926 and 934-951 or a reverse complement thereof. In some embodiments, the guide RNA is encoded by a sequence according to any one of the nucleic acid sequences of SEQ ID NOs: 903-926 and 934-951 or a reverse complement thereof.

[0388] In some embodiments, the sequence is determined by a BLASTP, CLUSTALW, MUSCLE, or MAFFT algorithm, or a CLUSTALW algorithm with the Smith-Waterman homology search algorithm parameters. In some embodiments, the sequence is determined by the BLASTP homology search algorithm using parameters of a wordlength (W) of 3, an expectation (E) of 10, and a BLOSUM62 scoring matrix setting gap costs at existence of 11, extension of 1, and using a conditional compositional score matrix adjustment.

### Cargo Nucleic Acids

[0389] In some embodiments, the retrotransposase system comprises a cargo nucleic acid or polynucleotide. In some embodiments, the cargo nucleic acid is comprised in a double-stranded deoxyribonucleic acid. In some embodiments, the cargo nucleic acid is a eukaryotic, plant, fungal, mammalian, rodent, or human double-stranded deoxyribonucleic acid polynucleotide. In some embodiments, the cargo nucleotide sequence is flanked by a 3′ untranslated region (UTR) and a 5′ untranslated region (UTR).

[0390] In some embodiments, the cargo nucleic acid comprises synthetic nucleotides or modified nucleotides. In some embodiments, the cargo nucleic acid comprises one or more inter-nucleoside linkers modified from the natural phosphodiester. In some embodiments, all of the inter-nucleoside linkers of the cargo nucleic acid, or contiguous nucleotide sequence thereof, are modified. For example, in some embodiments, the inter-nucleoside linkage comprises Sulphur (S), such as a phosphorothioate inter-nucleoside linkage.

[0391] In some embodiments, the cargo nucleic acid comprises modifications to a ribose sugar or nucleobase. In some embodiments, the cargo nucleic acid comprises one or more nucleosides comprising a modified sugar moiety, wherein the modified sugar moiety is a modification of the sugar moiety when compared to the ribose sugar moiety found in deoxyribose nucleic acid (DNA) and RNA. In some embodiments, the modification is within the ribose ring structure. Exemplary modifications include, but are not limited to, replacement with a hexose ring (HNA), a bicyclic ring having a biradical bridge between the C2 and C4 carbons on the ribose ring (e.g., locked nucleic acids (LNA)), or an unlinked ribose ring which typically lacks a bond between the C2 and C3 carbons (e.g., UNA). In some embodiments, the sugar-modified nucleosides comprise bicyclohexose nucleic acids or tricyclic nucleic acids. In some embodiments, the modified nucleosides comprise nucleosides where the sugar moiety is replaced with a non-sugar moiety, for example peptide nucleic acids (PNA) or morpholino nucleic acids.

[0392] In some embodiments, the cargo nucleic acid comprises one or more modified sugars. In some embodiments, the sugar modifications comprise modifications made by altering the substituent groups on the ribose ring to groups other than hydrogen, or the 2′-OH group naturally found in DNA and RNA nucleosides. In some embodiments, substituents are introduced at the 2′, 3′, 4′, 5′ positions, or combinations thereof. In some embodiments, nucleosides with modified sugar moieties comprise 2′ modified nucleosides, e.g., 2′ substituted nucleosides. A 2′ sugar modified nucleoside, in some embodiments, is a nucleoside that has a substituent other than —H or —OH at the 2′ position (2′ substituted nucleoside) or comprises a 2′ linked biradical, and comprises 2′ substituted nucleosides and LNA (2′-4′ biradical bridged) nucleosides. Examples of 2′-substituted modified nucleosides comprise, but are not limited to, 2′-O-alkyl-RNA, 2′-O-methyl-RNA, 2′-alkoxy-RNA, 2′-O-methoxyethyl-RNA (MOE), 2′-amino-DNA, 2′-Fluoro-RNA, and 2′-F-ANA nucleosides. In some embodiments, the modification in the ribose group comprises a modification at the 2′ position of the ribose group. In some embodiments, the modification at the 2′ position of the ribose group is selected from the group consisting of 2′-O-methyl, 2′-fluoro, 2′-deoxy, and 2′-O-(2-methoxyethyl).

[0393] In some embodiments, the cargo nucleic acid comprises one or more modified sugars. In some embodiments, the cargo nucleic acid comprises only modified sugars. In certain embodiments, the cargo nucleic acid comprises greater than about 10%, 25%, 50%, 75%, or 90% modified sugars. In some embodiments, the modified sugar is a bicyclic sugar. In some embodiments, the modified sugar comprises a 2′-O-methoxyethyl group. In some embodiments, the cargo nucleic acid comprises both inter-nucleoside linker modifications and nucleoside modifications.

### MG Systems

[0394] Described herein, in certain embodiments, are engineered retrotransposase system, comprising: (a) a double-stranded nucleic acid comprising a cargo nucleotide sequence configured to form a complex with a retrotransposase; and (b) a retrotransposase configured to transpose the cargo nucleotide sequence to a target nucleic acid sequence. In some embodiments, engineered retrotransposase systems described herein comprise a means for cutting a target nucleic acid sequence.

[0395] In some embodiments, the engineered retrotransposase system comprises (a) a double-stranded nucleic acid comprising a cargo nucleotide sequence configured to form a complex with a retrotransposase; and (b) a retrotransposase configured to transpose the cargo nucleotide sequence to a target nucleic acid sequence and comprising an amino acid sequence having at least 70% sequence identity to any one of SEQ ID NOs: 1-29, 393-735, 799-895, 1020-1476, 1544-1554, 1850-2160, 2165-2210, and 2258-2266. In some embodiments, the engineered retrotransposase system comprises (a) a double-stranded nucleic acid comprising a cargo nucleotide sequence configured to form a complex with a retrotransposase; and (b) a retrotransposase configured to transpose the cargo nucleotide sequence to a target nucleic acid sequence and comprising an amino acid sequence having at least 75% sequence identity to any one of SEQ ID NOs: 1-29, 393-735, 799-895, 1020-1476, 1544-1554, 1850-2160, 2165-2210, and 2258-2266. In some embodiments, the engineered retrotransposase system comprises (a) a double-stranded nucleic acid comprising a cargo nucleotide sequence configured to form a complex with a retrotransposase; and (b) a retrotransposase configured to transpose the cargo nucleotide sequence to a target nucleic acid sequence and comprising an amino acid sequence having at least 80% sequence identity to any one of SEQ ID NOs: 1-29, 393-735, 799-895, 1020-1476, 1544-1554, 1850-2160, 2165-2210, and 2258-2266. In some embodiments, the engineered retrotransposase system comprises (a) a double-stranded nucleic acid comprising a cargo nucleotide sequence configured to form a complex with a retrotransposase; and (b) a retrotransposase configured to transpose the cargo nucleotide sequence to a target nucleic acid sequence and comprising an amino acid sequence having at least 85% sequence identity to any one of SEQ ID NOs: 1-29, 393-735, 799-895, 1020-1476, 1544-1554, 1850-2160, 2165-2210, and 2258-2266. In some embodiments, the engineered retrotransposase system comprises (a) a double-stranded nucleic acid comprising a cargo nucleotide sequence configured to form a complex with a retrotransposase; and (b) a retrotransposase configured to transpose the cargo nucleotide sequence to a target nucleic acid sequence and comprising an amino acid sequence having at least 90% sequence identity to any one of SEQ ID NOs: 1-29, 393-735, 799-895, 1020-1476, 1544-1554, 1850-2160, 2165-2210, and 2258-2266. In some embodiments, the engineered retrotransposase system comprises (a) a double-stranded nucleic acid comprising a cargo nucleotide sequence configured to form a complex with a retrotransposase; and (b) a retrotransposase configured to transpose the cargo nucleotide sequence to a target nucleic acid sequence and comprising an amino acid sequence having at least 95% sequence identity to any one of SEQ ID NOs: 1-29, 393-735, 799-895, 1020-1476, 1544-1554, 1850-2160, 2165-2210, and 2258-2266. In some embodiments, the engineered retrotransposase system comprises (a) a double-stranded nucleic acid comprising a cargo nucleotide sequence configured to form a complex with a retrotransposase; and (b) a retrotransposase configured to transpose the cargo nucleotide sequence to a target nucleic acid sequence and comprising an amino acid sequence having at least 96% sequence identity to any one of SEQ ID NOs: 1-29, 393-735, 799-895, 1020-1476, 1544-1554, 1850-2160, 2165-2210, and 2258-2266. In some embodiments, the engineered retrotransposase system comprises (a) a double-stranded nucleic acid comprising a cargo nucleotide sequence configured to form a complex with a retrotransposase; and (b) a retrotransposase configured to transpose the cargo nucleotide sequence to a target nucleic acid sequence and comprising an amino acid sequence having at least 97% sequence identity to any one of SEQ ID NOs: 1-29, 393-735, 799-895, 1020-1476, 1544-1554, 1850-2160, 2165-2210, and 2258-2266. In some embodiments, the engineered retrotransposase system comprises (a) a double-stranded nucleic acid comprising a cargo nucleotide sequence configured to form a complex with a retrotransposase; and (b) a retrotransposase configured to transpose the cargo nucleotide sequence to a target nucleic acid sequence and comprising an amino acid sequence having at least 98% sequence identity to any one of SEQ ID NOs: 1-29, 393-735, 799-895, 1020-1476, 1544-1554, 1850-2160, 2165-2210, and 2258-2266. In some embodiments, the engineered retrotransposase system comprises (a) a double-stranded nucleic acid comprising a cargo nucleotide sequence configured to form a complex with a retrotransposase; and (b) a retrotransposase configured to transpose the cargo nucleotide sequence to a target nucleic acid sequence and comprising an amino acid sequence having at least 99% sequence identity to any one of SEQ ID NOs: 1-29, 393-735, 799-895, 1020-1476, 1544-1554, 1850-2160, 2165-2210, and 2258-2266. In some embodiments, the engineered retrotransposase system comprises (a) a double-stranded nucleic acid comprising a cargo nucleotide sequence configured to form a complex with a retrotransposase; and (b) a retrotransposase configured to transpose the cargo nucleotide sequence to a target nucleic acid sequence and comprising an amino acid sequence having 100% sequence identity to any one of SEQ ID NOs: 1-29, 393-735, 799-895, 1020-1476, 1544-1554, 1850-2160, 2165-2210, and 2258-2266.

[0396] In some embodiments, the retrotransposase is a MG140 retrotransposase (i.e., SEQ ID NOs: 1-29, 393-401, 799-894, 1476, 1850-1926, and 2165-2210). In some embodiments, the retrotransposase comprises a sequence having at least about 20%, at least about 25%, at least about 30%, at least about 35%, at least about 40%, at least about 45%, at least about 50%, at least about 55%, at least about 60%, at least about 65%, at least about 70%, at least about 75%, at least about 80%, at least about 85%, at least about 90%, at least about 91%, at least about 92%, at least about 93%, at least about 94%, at least about 95%, at least about 96%, at least about 97%, at least about 98%, at least about 99%, or 100% sequence identity to any one of SEQ ID NOs: 1-29, 393-401, 799-894, 1476, 1850-1926, and 2165-2210.

[0397] In some embodiments, the retrotransposase is a MG146 retrotransposase (i.e., SEQ ID NO: 402 or SEQ ID NO: 895). In some embodiments, the retrotransposase comprises a sequence having at least about 20%, at least about 25%, at least about 30%, at least about 35%, at least about 40%, at least about 45%, at least about 50%, at least about 55%, at least about 60%, at least about 65%, at least about 70%, at least about 75%, at least about 80%, at least about 85%, at least about 90%, at least about 91%, at least about 92%, at least about 93%, at least about 94%, at least about 95%, at least about 96%, at least about 97%, at least about 98%, at least about 99%, or 100% sequence identity to SEQ ID NO: 402 or SEQ ID NO: 895.

[0398] In some embodiments, the retrotransposase is a MG148 retrotransposase (i.e., SEQ ID NOs: 403-426). In some embodiments, the retrotransposase comprises a sequence having at least about 20%, at least about 25%, at least about 30%, at least about 35%, at least about 40%, at least about 45%, at least about 50%, at least about 55%, at least about 60%, at least about 65%, at least about 70%, at least about 75%, at least about 80%, at least about 85%, at least about 90%, at least about 91%, at least about 92%, at least about 93%, at least about 94%, at least about 95%, at least about 96%, at least about 97%, at least about 98%, at least about 99%, or 100% sequence identity to any one of SEQ ID NOs: 403-426.

[0399] In some embodiments, the retrotransposase is a MG149 retrotransposase (i.e., SEQ ID NOs: 427-439). In some embodiments, the retrotransposase comprises a sequence having at least about 20%, at least about 25%, at least about 30%, at least about 35%, at least about 40%, at least about 45%, at least about 50%, at least about 55%, at least about 60%, at least about 65%, at least about 70%, at least about 75%, at least about 80%, at least about 85%, at least about 90%, at least about 91%, at least about 92%, at least about 93%, at least about 94%, at least about 95%, at least about 96%, at least about 97%, at least about 98%, at least about 99%, or 100% sequence identity to any one of SEQ ID NOs: 427-439.

[0400] In some embodiments, the retrotransposase is a MG151 retrotransposase (i.e., SEQ ID NOs: 440-554 and 1020-1037). In some embodiments, the retrotransposase comprises a sequence having at least about 20%, at least about 25%, at least about 30%, at least about 35%, at least about 40%, at least about 45%, at least about 50%, at least about 55%, at least about 60%, at least about 65%, at least about 70%, at least about 75%, at least about 80%, at least about 85%, at least about 90%, at least about 91%, at least about 92%, at least about 93%, at least about 94%, at least about 95%, at least about 96%, at least about 97%, at least about 98%, at least about 99%, or 100% sequence identity ty to any one of SEQ ID NOs: 440-554 and 1020-1037.

[0401] In some embodiments, the retrotransposase is a MG153 retrotransposase (i.e., SEQ ID NOs: 555-608 and 1927-2010). In some embodiments, the retrotransposase comprises a sequence having at least about 20%, at least about 25%, at least about 30%, at least about 35%, at least about 40%, at least about 45%, at least about 50%, at least about 55%, at least about 60%, at least about 65%, at least about 70%, at least about 75%, at least about 80%, at least about 85%, at least about 90%, at least about 91%, at least about 92%, at least about 93%, at least about 94%, at least about 95%, at least about 96%, at least about 97%, at least about 98%, at least about 99%, or 100% sequence identity to any one of SEQ ID NOs: 555-608 and 1927-2010.

[0402] In some embodiments, the retrotransposase is a MG154 retrotransposase (i.e., SEQ ID NOs: 609-610 and 1555). In some embodiments, the retrotransposase comprises a sequence having at least about 20%, at least about 25%, at least about 30%, at least about 35%, at least about 40%, at least about 45%, at least about 50%, at least about 55%, at least about 60%, at least about 65%, at least about 70%, at least about 75%, at least about 80%, at least about 85%, at least about 90%, at least about 91%, at least about 92%, at least about 93%, at least about 94%, at least about 95%, at least about 96%, at least about 97%, at least about 98%, at least about 99%, or 100% sequence identity to any one of SEQ ID NOs: 609-610 and 1555.

[0403] In some embodiments, the retrotransposase is a MG155 retrotransposase (i.e., SEQ ID NOs: 611-615 and 1544-1545). In some embodiments, the retrotransposase comprises a sequence having at least about 20%, at least about 25%, at least about 30%, at least about 35%, at least about 40%, at least about 45%, at least about 50%, at least about 55%, at least about 60%, at least about 65%, at least about 70%, at least about 75%, at least about 80%, at least about 85%, at least about 90%, at least about 91%, at least about 92%, at least about 93%, at least about 94%, at least about 95%, at least about 96%, at least about 97%, at least about 98%, at least about 99%, or 100% sequence identity to any one of SEQ ID NOs: 611-615 and 1544-1545.

[0404] In some embodiments, the retrotransposase is a MG156 retrotransposase (i.e., SEQ ID NO: 616 or SEQ ID NO: 617). In some embodiments, the retrotransposase comprises a sequence having at least about 20%, at least about 25%, at least about 30%, at least about 35%, at least about 40%, at least about 45%, at least about 50%, at least about 55%, at least about 60%, at least about 65%, at least about 70%, at least about 75%, at least about 80%, at least about 85%, at least about 90%, at least about 91%, at least about 92%, at least about 93%, at least about 94%, at least about 95%, at least about 96%, at least about 97%, at least about 98%, at least about 99%, or 100% sequence identity to SEQ ID NO: 616 or SEQ ID NO: 617.

[0405] In some embodiments, the retrotransposase is a MG157 retrotransposase (i.e., SEQ ID NOs: 618-622 and 2258-2266). In some embodiments, the retrotransposase comprises a sequence having at least about 20%, at least about 25%, at least about 30%, at least about 35%, at least about 40%, at least about 45%, at least about 50%, at least about 55%, at least about 60%, at least about 65%, at least about 70%, at least about 75%, at least about 80%, at least about 85%, at least about 90%, at least about 91%, at least about 92%, at least about 93%, at least about 94%, at least about 95%, at least about 96%, at least about 97%, at least about 98%, at least about 99%, or 100% sequence identity to any one of SEQ ID NOs: 618-622 and 2258-2266.

[0406] In some embodiments, the retrotransposase is a MG158 retrotransposase (i.e., SEQ ID NO: 623). In some embodiments, the retrotransposase comprises a sequence having at least about 20%, at least about 25%, at least about 30%, at least about 35%, at least about 40%, at least about 45%, at least about 50%, at least about 55%, at least about 60%, at least about 65%, at least about 70%, at least about 75%, at least about 80%, at least about 85%, at least about 90%, at least about 91%, at least about 92%, at least about 93%, at least about 94%, at least about 95%, at least about 96%, at least about 97%, at least about 98%, at least about 99%, or 100% sequence identity to SEQ ID NO: 623.

[0407] In some embodiments, the retrotransposase is a MG159 retrotransposase (i.e., SEQ ID NOs: 624-626). In some embodiments, the retrotransposase comprises a sequence having at least about 20%, at least about 25%, at least about 30%, at least about 35%, at least about 40%, at least about 45%, at least about 50%, at least about 55%, at least about 60%, at least about 65%, at least about 70%, at least about 75%, at least about 80%, at least about 85%, at least about 90%, at least about 91%, at least about 92%, at least about 93%, at least about 94%, at least about 95%, at least about 96%, at least about 97%, at least about 98%, at least about 99%, or 100% sequence identity to any one of SEQ ID NOs: 624-626.

[0408] In some embodiments, the retrotransposase is a MG160 retrotransposase (i.e., SEQ ID NOs: 627-673, and 1039-1475, and 2011-2026). In some embodiments, the retrotransposase comprises a sequence having at least about 20%, at least about 25%, at least about 30%, at least about 35%, at least about 40%, at least about 45%, at least about 50%, at least about 55%, at least about 60%, at least about 65%, at least about 70%, at least about 75%, at least about 80%, at least about 85%, at least about 90%, at least about 91%, at least about 92%, at least about 93%, at least about 94%, at least about 95%, at least about 96%, at least about 97%, at least about 98%, at least about 99%, or 100% sequence identity to any one of SEQ ID NOs: 627-673, and 1039-1475, and 2011-2026.

[0409] In some embodiments, the retrotransposase is a MG163 retrotransposase (i.e., SEQ ID NOs: 674-678). In some embodiments, the retrotransposase comprises a sequence having at least about 20%, at least about 25%, at least about 30%, at least about 35%, at least about 40%, at least about 45%, at least about 50%, at least about 55%, at least about 60%, at least about 65%, at least about 70%, at least about 75%, at least about 80%, at least about 85%, at least about 90%, at least about 91%, at least about 92%, at least about 93%, at least about 94%, at least about 95%, at least about 96%, at least about 97%, at least about 98%, at least about 99%, or 100% sequence identity to any one of SEQ ID NOs: 674-678.

[0410] In some embodiments, the retrotransposase is a MG164 retrotransposase (i.e., SEQ ID NOs: 679-683). In some embodiments, the retrotransposase comprises a sequence having at least about 20%, at least about 25%, at least about 30%, at least about 35%, at least about 40%, at least about 45%, at least about 50%, at least about 55%, at least about 60%, at least about 65%, at least about 70%, at least about 75%, at least about 80%, at least about 85%, at least about 90%, at least about 91%, at least about 92%, at least about 93%, at least about 94%, at least about 95%, at least about 96%, at least about 97%, at least about 98%, at least about 99%, or 100% sequence identity to any one of SEQ ID NOs: 679-683.

[0411] In some embodiments, the retrotransposase is a MG165 retrotransposase (i.e., SEQ ID NOs: 684-692 and 2027-2046). In some embodiments, the retrotransposase comprises a sequence having at least about 20%, at least about 25%, at least about 30%, at least about 35%, at least about 40%, at least about 45%, at least about 50%, at least about 55%, at least about 60%, at least about 65%, at least about 70%, at least about 75%, at least about 80%, at least about 85%, at least about 90%, at least about 91%, at least about 92%, at least about 93%, at least about 94%, at least about 95%, at least about 96%, at least about 97%, at least about 98%, at least about 99%, or 100% sequence identity to any one of SEQ ID NOs: 684-692 and 2027-2046.

[0412] In some embodiments, the retrotransposase is a MG166 retrotransposase (i.e., SEQ ID NOs: 693-697 and 2047-2090). In some embodiments, the retrotransposase comprises a sequence having at least about 20%, at least about 25%, at least about 30%, at least about 35%, at least about 40%, at least about 45%, at least about 50%, at least about 55%, at least about 60%, at least about 65%, at least about 70%, at least about 75%, at least about 80%, at least about 85%, at least about 90%, at least about 91%, at least about 92%, at least about 93%, at least about 94%, at least about 95%, at least about 96%, at least about 97%, at least about 98%, at least about 99%, or 100% sequence identity to any one of SEQ ID NOs: 693-697 and 2047-2090.

[0413] In some embodiments, the retrotransposase is a MG167 retrotransposase (i.e., SEQ ID NOs: 698-702 and 2091-2119). In some embodiments, the retrotransposase comprises a sequence having at least about 20%, at least about 25%, at least about 30%, at least about 35%, at least about 40%, at least about 45%, at least about 50%, at least about 55%, at least about 60%, at least about 65%, at least about 70%, at least about 75%, at least about 80%, at least about 85%, at least about 90%, at least about 91%, at least about 92%, at least about 93%, at least about 94%, at least about 95%, at least about 96%, at least about 97%, at least about 98%, at least about 99%, or 100% sequence identity to any one of SEQ ID NOs: 698-702 and 2091-2119.

[0414] In some embodiments, the retrotransposase is a MG168 retrotransposase (i.e., SEQ ID NOs: 703-707). In some embodiments, the retrotransposase comprises a sequence having at least about 20%, at least about 25%, at least about 30%, at least about 35%, at least about 40%, at least about 45%, at least about 50%, at least about 55%, at least about 60%, at least about 65%, at least about 70%, at least about 75%, at least about 80%, at least about 85%, at least about 90%, at least about 91%, at least about 92%, at least about 93%, at least about 94%, at least about 95%, at least about 96%, at least about 97%, at least about 98%, at least about 99%, or 100% sequence identity to any one of SEQ ID NOs: 703-707.

[0415] In some embodiments, the retrotransposase is a MG169 retrotransposase (i.e., SEQ ID NOs: 708-718 and 2121-2159). In some embodiments, the retrotransposase comprises a sequence having at least about 20%, at least about 25%, at least about 30%, at least about 35%, at least about 40%, at least about 45%, at least about 50%, at least about 55%, at least about 60%, at least about 65%, at least about 70%, at least about 75%, at least about 80%, at least about 85%, at least about 90%, at least about 91%, at least about 92%, at least about 93%, at least about 94%, at least about 95%, at least about 96%, at least about 97%, at least about 98%, at least about 99%, or 100% sequence identity to any one of SEQ ID NOs: 708-718 and 2121-2159.

[0416] In some embodiments, the retrotransposase is a MG170 retrotransposase (i.e., SEQ ID NOs: 719-728). In some embodiments, the retrotransposase comprises a sequence having at least about 20%, at least about 25%, at least about 30%, at least about 35%, at least about 40%, at least about 45%, at least about 50%, at least about 55%, at least about 60%, at least about 65%, at least about 70%, at least about 75%, at least about 80%, at least about 85%, at least about 90%, at least about 91%, at least about 92%, at least about 93%, at least about 94%, at least about 95%, at least about 96%, at least about 97%, at least about 98%, at least about 99%, or 100% sequence identity to any one of SEQ ID NOs: 719-728.

[0417] In some embodiments, the retrotransposase is a MG172 retrotransposase (i.e., SEQ ID NOs: 729-733). In some embodiments, the retrotransposase comprises a sequence having at least about 20%, at least about 25%, at least about 30%, at least about 35%, at least about 40%, at least about 45%, at least about 50%, at least about 55%, at least about 60%, at least about 65%, at least about 70%, at least about 75%, at least about 80%, at least about 85%, at least about 90%, at least about 91%, at least about 92%, at least about 93%, at least about 94%, at least about 95%, at least about 96%, at least about 97%, at least about 98%, at least about 99%, or 100% sequence identity to any one of SEQ ID NOs: 729-733.

[0418] In some embodiments, the retrotransposase is a MG173 retrotransposase (i.e., SEQ ID NOs: 734-735 and 1546-1553). In some embodiments, the retrotransposase comprises a sequence having at least about 20%, at least about 25%, at least about 30%, at least about 35%, at least about 40%, at least about 45%, at least about 50%, at least about 55%, at least about 60%, at least about 65%, at least about 70%, at least about 75%, at least about 80%, at least about 85%, at least about 90%, at least about 91%, at least about 92%, at least about 93%, at least about 94%, at least about 95%, at least about 96%, at least about 97%, at least about 98%, at least about 99%, or 100% sequence identity to any one of SEQ ID NOs: 734-735 and 1546-1553.

[0419] In some embodiments, the retrotransposase is a MG176 retrotransposase (i.e., SEQ ID NO: 1038 or SEQ ID NO: 2160). In some embodiments, the retrotransposase comprises a sequence having at least about 20%, at least about 25%, at least about 30%, at least about 35%, at least about 40%, at least about 45%, at least about 50%, at least about 55%, at least about 60%, at least about 65%, at least about 70%, at least about 75%, at least about 80%, at least about 85%, at least about 90%, at least about 91%, at least about 92%, at least about 93%, at least about 94%, at least about 95%, at least about 96%, at least about 97%, at least about 98%, at least about 99%, or 100% sequence identity to SEQ ID NO: 1038 or SEQ ID NO: 2160.

[0420] In some embodiments, the retrotransposase is a MG192 retrotransposase (i.e., SEQ ID NO: 1554). In some embodiments, the retrotransposase comprises a sequence having at least about 20%, at least about 25%, at least about 30%, at least about 35%, at least about 40%, at least about 45%, at least about 50%, at least about 55%, at least about 60%, at least about 65%, at least about 70%, at least about 75%, at least about 80%, at least about 85%, at least about 90%, at least about 91%, at least about 92%, at least about 93%, at least about 94%, at least about 95%, at least about 96%, at least about 97%, at least about 98%, at least about 99%, or 100% sequence identity to SEQ ID NO: 1554.

### Cells

[0421] Described herein, in certain embodiments, is a cell comprising the systems described herein.

[0422] In some embodiments, the cell is a eukaryotic cell (e.g., a plant cell, an animal cell, a protist cell, or a fungi cell), a mammalian cell (a Chinese hamster ovary (CHO) cell, baby hamster kidney (BHK), human embryo kidney (HEK), mouse myeloma (NSO), or human retinal cells), an immortalized cell (e.g., a HeLa cell, a COS cell, a HEK-293T cell, a MDCK cell, a 3T3 cell, a PC12 cell, a Huh7 cell, a HepG2 cell, a K562 cell, a N2a cell, or a SY5Y cell), an insect cell (e.g., a Spodoptera frugiperda cell, a Trichoplusia ni cell, a Drosophila melanogaster cell, a S2 cell, or a Heliothis virescens cell), a yeast cell (e.g., a Saccharomyces cerevisiae cell, a Cryptococcus cell, or a Candida cell), a plant cell (e.g., a parenchyma cell, a collenchyma cell, or a sclerenchyma cell), a fungal cell (e.g., a Saccharomyces cerevisiae cell, a Cryptococcus cell, or a Candida cell), or a prokaryotic cell (e.g., a E. coli cell, a streptococcus bacterium cell, a streptomyces soil bacteria cell, or an archaea cell). In some embodiments, the cell is a eukaryotic cell. In some embodiments, the cell is a mammalian cell. In some embodiments, the cell is an immortalized cell. In some embodiments, the cell is an insect cell. In some embodiments, the cell is a yeast cell. In some embodiments, the cell is a plant cell. In some embodiments, the cell is a fungal cell. In some embodiments, the cell is a prokaryotic cell.

[0423] In some embodiments, the cell is an A549, HEK-293, HEK-293T, BHK, CHO, HeLa, MRC5, Sf9, Cos-1, Cos-7, Vero, BSC 1, BSC 40, BMT 10, WI38, HeLa, Saos, C2C12, L cell, HT1080, HepG2, Huh7, K562, a primary cell, or derivative thereof. In some embodiments, the cell is an engineered cell. In some embodiments, the cell is a stable cell (i.e., a cell that has constant expression of a specific gene or protein).

### Delivery and Vectors

[0424] Disclosed herein, in some embodiments, are nucleic acid sequences encoding the engineered retrotransposase systems described herein.

[0425] In some embodiments, the present disclosure provides a nucleic acid comprising an engineered nucleic acid sequence encoding a retrotransposase described herein. In some embodiments, the engineered nucleic acid sequence encoding a retrotransposase is optimized for expression in an organism. In some embodiments, the retrotransposase is derived from an uncultivated microorganism. In some embodiments, the organism is not the uncultivated organism.

[0426] In some embodiments, the organism is prokaryotic. In some embodiments, the organism is bacterial. In some embodiments, the organism is eukaryotic. In some embodiments, the organism is fungal. In some embodiments, the organism is a plant. In some embodiments, the organism is mammalian. In some embodiments, the organism is a rodent. In some embodiments, the organism is human.

[0427] In some embodiments, the nucleic acid encoding the engineered retrotransposase system is a DNA, for example a linear DNA, a plasmid DNA, or a minicircle DNA. In some embodiments, the nucleic acid encoding the engineered nuclease system is an RNA, for example a mRNA.

[0428] In some embodiments, the nucleic acid encoding the engineered retrotransposase systems is delivered by a nucleic acid-based vector. In some embodiments, the nucleic acid-based vector is plasmid (e.g., circular DNA molecules that can autonomously replicate inside a cell), cosmid (e.g., pWE or sCos vectors), artificial chromosome, human artificial chromosome (HAC), yeast artificial chromosomes (YAC), bacterial artificial chromosome (BAC), P1-derived artificial chromosomes (PAC), phagemid, phage derivative, bacmid, or virus. In some embodiments, the vector is selected from the group consisting of: pSF-CMV-NEO-NH2-PPT-3×FLAG, pSF-CMV-NEO-COOH-3×FLAG, pSF-CMV-PURO-NH2-GST-TEV, pSF-OXB20-COOH-TEV-FLAG (R)-6His, pCEP4 pDEST27, pSF-CMV-Ub-KrYFP, pSF-CMV-FMDV-daGFP, pEFla-mCherry-N1 vector, pEFla-tdTomato vector, pSF-CMV-FMDV-Hygro, pSF-CMV-PGK-Puro, pMCP-tag (m), pSF-CMV-PURO-NH2-CMYC, pSF-OXB20-BetaGal, pSF-OXB20-Fluc, pSF-OXB20, pSF-Tac, pRI 101-AN DNA, pCambia2301, pTYB21 pKLAC2, pAc5.1/V5-His A, and pDEST8.

[0429] In some embodiments, the virus is an alphavirus, a parvovirus, an adenovirus, an AAV, a baculovirus, a Dengue virus, a lentivirus, a herpesvirus, a poxvirus, an anellovirus, a bocavirus, a vaccinia virus, or a retrovirus. In some embodiments, the virus is an alphavirus. In some embodiments, the virus is a parvovirus. In some embodiments, the virus is an adenovirus. In some embodiments, the virus is an AAV. In some embodiments, the virus is a baculovirus. In some embodiments, the virus is a Dengue virus. In some embodiments, the virus is a lentivirus. In some embodiments, the virus is a herpesvirus. In some embodiments, the virus is a poxvirus. In some embodiments, the virus is an anellovirus. In some embodiments, the virus is a bocavirus. In some embodiments, the virus is a vaccinia virus. In some embodiments, the virus is a retrovirus.

[0430] In some embodiments, the AAV is AAV1, AAV2, AAV3, AAV4, AAV5, AAV6, AAV7, AAV8, AAV9, AAV10, AAV11, AAV12, AAV13, AAV14, AAV15, AAV16, AAV-rh8, AAV-rh10, AAV-rh20, AAV-rh39, AAV-rh74, AAV-rhM4-1, AAV-hu37, AAV-Anc80, AAV-Anc80L65, AAV-7m8, AAV-PHP-B, AAV-PHP-EB, AAV-2.5, AAV-2YF, AAV-3B, AAV-LK03, AAV-HSC1, AAV-HSC2, AAV-HSC3, AAV-HSC4, AAV-HSC5, AAV-HSC6, AAV-HSC7, AAV-HSC8, AAV-HSC9, AAV-HSC10, AAV-HSC11, AAV-HSC12, AAV-HSC13, AAV-HSC14, AAV-HSC15, AAV-TT, AAV-DJ/8, AAV-Myo, AAV-NP40, AAV-NP59, AAV-NP22, AAV-NP66, AAV-HSC16, or a derivative thereof. In some embodiments, the herpesvirus is HSV type 1, HSV-2, VZV, EBV, CMV, HHV-6, HHV-7, or HHV-8.

[0431] In some embodiments, the nucleic acid encoding the engineered retrotransposase system is delivered by a non-nucleic acid-based delivery system (e.g., a non-viral delivery system). In some embodiments, the non-viral delivery system is a liposome. In some embodiments, the nucleic acid is associated with a lipid. The nucleic acid associated with a lipid, in some embodiments, is encapsulated in the aqueous interior of a liposome, interspersed within the lipid bilayer of a liposome, attached to a liposome via a linking molecule that is associated with both the liposome and the nucleic acid, entrapped in a liposome, complexed with a liposome, dispersed in a solution containing a lipid, mixed with a lipid, combined with a lipid, contained as a suspension in a lipid, contained or complexed with a micelle, or otherwise associated with a lipid. In some embodiments, the nucleic acid is comprised in a lipid nanoparticle (LNP).

[0432] In some embodiments, the endonuclease or gene editing system (e.g., retrotransposase) is introduced into a cell (e.g., host cell) in any suitable way, either stably or transiently. In some embodiments, the endonuclease or gene editing system is transfected into the cell. In some embodiments, the cell is transduced or transfected with a nucleic acid construct that encodes the endonuclease or gene editing system. For example, a cell is transduced (e.g., with a virus encoding the endonuclease or gene editing system), or transfected (e.g., with a plasmid encoding the endonuclease or gene editing system) with a nucleic acid that encodes the endonuclease or gene editing system. In some embodiments, the transduction is a stable or transient transduction. In some embodiments, cells expressing the endonuclease or gene editing system or containing the endonuclease or gene editing system are transduced or transfected with one or more gRNA molecules, for example when the endonuclease or gene editing system comprises the retrotransposase. In some embodiments, a plasmid expressing the endonuclease or gene editing system is introduced into cells through electroporation, transient (e.g., lipofection) or stable genome integration (e.g., piggybac), or viral transduction (for example lentivirus or AAV), or other methods known to those of skill in the art. In some embodiments, the gene editing system is introduced into the cell as one or more polypeptides. In some embodiments, delivery is achieved through the use of RNP complexes. Delivery methods to cells for polypeptides and/or RNPs are known in the art, for example by electroporation or by cell squeezing.

[0433] Exemplary methods of delivery of nucleic acids include lipofection, nucleofection, electroporation, stable genome integration (e.g., piggybac), microinjection, biolistics, virosomes, liposomes, immunoliposomes, polycation or lipidnucleic acid conjugates, naked DNA, artificial virions, and agent-enhanced uptake of DNA. Lipofection is described in e.g., U.S. Pat. Nos. 5,049,386; 4,946,787; and 4,897,355; and lipofection reagents are sold commercially (e.g., Transfectam™, Lipofectin™ and SF Cell Line 4D-Nucleofector X Kit™ (Lonza)). Cationic and neutral lipids that are suitable for efficient receptor-recognition lipofection of polynucleotides include those of WO 91/17424 and WO 91/16024. In some embodiments, the delivery is to cells (e.g., in vitro or ex vivo administration) or target tissues (e.g., in vivo administration). In some embodiments, the nucleic acid is comprised in a liposome or a nanoparticle that specifically targets a host cell.

[0434] Additional methods for the delivery of nucleic acids to cells are known to those skilled in the art. See, for example, US 2003/0087817.

### Methods of Use

[0435] Systems of the present disclosure may be used for various applications, such as, for example, nucleic acid editing (e.g., gene editing), binding to a nucleic acid molecule (e.g., sequence-specific binding). Such systems may be used, for example, for addressing (e.g., removing or replacing) a genetically inherited mutation that may cause a disease in a subject, inactivating a gene in order to ascertain its function in a cell, as a diagnostic tool to detect disease-causing genetic elements (e.g., via cleavage of reverse-transcribed viral RNA or an amplified DNA sequence encoding a disease-causing mutation), as deactivated enzymes in combination with a probe to target and detect a specific nucleotide sequence (e.g., sequence encoding antibiotic resistance int bacteria), to render viruses inactive or incapable of infecting host cells by targeting viral genomes, to add genes or amend metabolic pathways to engineer organisms to produce valuable small molecules, macromolecules, or secondary metabolites, to establish a gene drive element for evolutionary selection, to detect cell perturbations by foreign small molecules and nucleotides as a biosensor.

[0436] Described herein, in certain embodiments, are methods for modifying a target nucleic acid comprising providing an engineered retrotransposase system. In some embodiments, the present disclosure provides a method for binding, nicking, cleaving, marking, modifying, or transposing a double-stranded deoxyribonucleic acid polynucleotide. In some embodiments, the method comprises contacting the double-stranded deoxyribonucleic acid polynucleotide with a retrotransposase.

[0437] In some embodiments, the double-stranded deoxyribonucleic acid polynucleotide is a eukaryotic, plant, fungal, mammalian, rodent, or human double-stranded deoxyribonucleic acid polynucleotide.

[0438] In some embodiments, the retrotransposase is configured to transpose the cargo nucleotide sequence as single-stranded deoxyribonucleic acid polynucleotide. In some embodiments, the retrotransposase is configured to transpose the cargo nucleotide sequence as double-stranded deoxyribonucleic acid polynucleotide. In some embodiments, the retrotransposase is configured to transpose the cargo nucleotide sequence via a ribonucleic acid polynucleotide intermediate. In some embodiments, the cargo nucleotide sequence is flanked by a 3′ untranslated region (UTR) and a 5′ untranslated region (UTR).

[0439] In some embodiments, the present disclosure provides a method of modifying a target nucleic acid sequence (e.g., locus). In some embodiments, the method comprises delivering to the target nucleic acid sequence the engineered retrotransposase system described herein. In some embodiments, the complex is configured such that upon binding of the complex to the target nucleic acid sequence, the complex modifies the target nucleic acid sequence.

[0440] In some embodiments, modifying the target nucleic acid sequence comprises binding, nicking, cleaving, marking, modifying, or transposing the target nucleic acid sequence. In some embodiments, the target nucleic acid sequence comprises deoxyribonucleic acid (DNA) or ribonucleic acid (RNA). In some embodiments, the target nucleic acid comprises genomic DNA, viral DNA, viral RNA, or bacterial DNA. In some embodiments, the target nucleic acid sequence is in vitro. In some embodiments, the target nucleic acid sequence is within a cell. In some embodiments, the cell is a prokaryotic cell, a bacterial cell, a eukaryotic cell, a fungal cell, a plant cell, an animal cell, a mammalian cell, a rodent cell, a primate cell, or a human cell. In some embodiments, the cell is a primary cell. In some embodiments, the primary cell is a T cell. In some embodiments, the primary cell is a hematopoietic stem cell (HSC). In some embodiments, the cell is a human cell. In some embodiments, the cell is genome edited ex vivo. In some embodiments, the cell is genome edited in vivo.

[0441] In some embodiments, delivery of the engineered retrotransposase system to the target nucleic acid sequence comprises delivering the nucleic acid described herein or the vector described herein. In some embodiments, delivery of engineered retrotransposase system to the target nucleic acid sequence comprises delivering a nucleic acid comprising an open reading frame encoding the retrotransposase. In some embodiments, the nucleic acid comprises a promoter. In some embodiments, the open reading frame encoding the retrotransposase is operably linked to the promoter.

[0442] In some embodiments, delivery of the engineered retrotransposase system to the target nucleic acid sequence comprises delivering a capped mRNA containing the open reading frame encoding the retrotransposase. In some embodiments, delivery of the engineered retrotransposase system to the target nucleic acid sequence comprises delivering a translated polypeptide. In some embodiments, delivery of the engineered retrotransposase system to the target nucleic acid sequence comprises delivering a deoxyribonucleic acid (DNA) encoding the engineered retrotransposase operably linked to a ribonucleic acid (RNA) pol III promoter.

[0443] In some embodiments, the retrotransposase does not induce a break at or proximal to the target nucleic acid sequence.

[0444] In some embodiments, the transposition activity is measured in vitro by introducing the retrotransposase to cells comprising the target nucleic acid sequence and detecting transposition of the target nucleic acid sequence in the cells. In some embodiments, the composition comprises 20 pmoles or less of the retrotransposase. In some embodiments, the composition comprises 1 pmol or less of the retrotransposase.

[0445] Further described herein, in certain embodiments, are methods of manufacturing a retrotransposase. In some embodiments, the method comprises cultivating a host cell with the engineered retrotransposase system described herein.

[0446] In some embodiments, the host cell is a bacterial cell. In some embodiments, the bacterial cell is Bifidobacterium longum, Bifidobacterium lactis, Bifidobacterium animalis, Bifidobacterium breve, Bifidobacterium infantis, Bifidobacterium adolescentis, Lactobacillus acidophilus, Lactobacillus casei, Lactobacillus paracasei, Lactobacillus salivarius, Lactobacillus reuteri, Lactobacillus rhamnosus, Lactobacillus johnsonii, Lactobacillus plantarum, Lactobacillus fermentum, Lactococcus lactis, Streptococcus thermophilus, Lactococcus lactis, Lactococcus diacetylactis, Lactococcus cremoris, Lactobacillus bulgaricus, Lactobacillus helveticus, Lactobacillus delbrueckii, or Escherichia coli. In some embodiments, the host cell is an E. coli cell. In some embodiments, the E. coli cell is a λDE3 lysogen or a BL21 (DE3) strain. In some embodiments, the E. coli cell has an ompT lon genotype.

[0447] In some embodiments, the host cell is an E. coli cell. In some embodiments, the E. coli cell is a λDE3 lysogen or the E. coli cell is a BL21 (DE3) strain. In some embodiments, the E. coli cell has an ompT lon genotype.

[0448] In some embodiments, the open reading frame is operably linked to a promoter sequence. In some embodiments, the promoter is selected from the group consisting of a mini promoter, an inducible promoter, a constitutive promoter, and derivatives thereof. In some embodiments, the promoter is selected from the group consisting of CMV, CBA, EF1a, CAG, PGK, TRE, U6, UAS, T7, Sp6, lac, araBad, trp, Ptac, p5, p19, p40, Synapsin, CaMKII, GRK1, and derivatives thereof.

[0449] In some embodiments, the open reading frame is operably linked to a T7 promoter sequence, a T7-lac promoter sequence, a lac promoter sequence, a tac promoter sequence, a trc promoter sequence, a ParaBAD promoter sequence, a PrhaBAD promoter sequence, a T5 promoter sequence, a cspA promoter sequence, an araP_{BAD} promoter, a strong leftward promoter from phage lambda (pL promoter), or any combination thereof.

[0450] In some embodiments, the open reading frame comprises a sequence encoding an affinity tag linked in-frame to a sequence encoding the retrotransposase. In some embodiments, the affinity tag is an immobilized metal affinity chromatography (IMAC) tag. In some embodiments, the IMAC tag is a polyhistidine tag. In some embodiments, the affinity tag is a myc tag, a human influenza hemagglutinin (HA) tag, a maltose binding protein (MBP) tag, a glutathione S-transferase (GST) tag, a streptavidin tag, a FLAG tag, or any combination thereof. In some embodiments, the affinity tag is linked in-frame to the sequence encoding the retrotransposase via a linker sequence encoding a protease cleavage site. In some embodiments, the protease cleavage site is a tobacco etch virus (TEV) protease cleavage site, a PreScission® protease cleavage site, a Thrombin cleavage site, a Factor Xa cleavage site, an enterokinase cleavage site, or any combination thereof.

[0451] In some embodiments, the open reading frame is codon-optimized for expression in the host cell. In some embodiments, the open reading frame is provided on a vector. In some embodiments, the open reading frame is integrated into a genome of the host cell.

[0452] In some embodiments, the present disclosure provides a culture comprising a host cell described herein in compatible liquid medium.

[0453] In some embodiments, the present disclosure provides a method of producing a retrotransposase, comprising cultivating a host cell described herein in compatible growth medium. In some embodiments, the method further comprises inducing expression of the retrotransposase by addition of an additional chemical agent or an increased amount of a nutrient. In some embodiments, the additional chemical agent or increased amount of a nutrient comprises Isopropyl β-D-1-thiogalactopyranoside (IPTG) or additional amounts of lactose. In some embodiments, the method further comprises isolating the host cell after the cultivation and lysing the host cell to produce a protein extract. In some embodiments, the method further comprises subjecting the protein extract to IMAC, or ion-affinity chromatography. In some embodiments, the open reading frame comprises a sequence encoding an IMAC affinity tag linked in-frame to a sequence encoding the retrotransposase. In some embodiments, the IMAC affinity tag is linked in-frame to the sequence encoding the retrotransposase via a linker sequence encoding protease cleavage site. In some embodiments, the protease cleavage site comprises a tobacco etch virus (TEV) protease cleavage site, a PreScission® protease cleavage site, a Thrombin cleavage site, a Factor Xa cleavage site, an enterokinase cleavage site, or any combination thereof. In some embodiments, the method further comprises cleaving the IMAC affinity tag by contacting a protease corresponding to the protease cleavage site to the retrotransposase. In some embodiments, the method further comprises performing subtractive IMAC affinity chromatography to remove the affinity tag from a composition comprising the retrotransposase.

### Kits

[0454] In some embodiments, this disclosure provides kits comprising one or more nucleic acid constructs encoding the various components of the retrotransposase or gene editing system described herein, e.g., comprising a nucleotide sequence encoding the components of the retrotransposase or gene editing system capable of modifying a target DNA sequence. In some embodiments, the nucleotide sequence comprises a heterologous promoter that drives expression of the gene editing system components.

[0455] In some embodiments, any of the retrotransposase or gene editing systems disclosed herein is assembled into a pharmaceutical, diagnostic, or research kit to facilitate its use in therapeutic, diagnostic, or research applications. A kit may include one or more containers housing any of the vectors disclosed herein and instructions for use.

[0456] The kit may be designed to facilitate use of the methods described herein by researchers and can take many forms. Each of the compositions of the kit, where applicable, may be provided in liquid form (e.g., in solution), or in solid form, (e.g., a dry powder). In certain cases, some of the compositions may be constitutable or otherwise processable (e.g., to an active form), for example, by the addition of a suitable solvent or other species (for example, water or a cell culture medium), which may or may not be provided with the kit. As used herein, “instructions” can define a component of instruction and/or promotion, and typically involve written instructions on or associated with packaging of the disclosure. Instructions also can include any oral or electronic instructions provided in any manner such that a user will clearly recognize that the instructions are to be associated with the kit, for example, audiovisual (e.g., videotape, DVD, etc.), Internet, and/or web-based communications, etc. The written instructions, in some embodiments, are in a form prescribed by a governmental agency regulating the manufacture, use, or sale of pharmaceuticals or biological products, which instructions can also reflect approval by the agency of manufacture, use, or sale for animal administration.

### EXAMPLES

### Example 1—A Method of Metagenomic Analysis for New Proteins

[0457] Samples for metagenomic analysis were collected from sediment, soil, and animals. Samples were collected with consent of property owners. Additional raw sequence data from public sources included animal microbiomes, sediment, soil, hot springs, hydrothermal vents, marine, peat bogs, permafrost, and sewage sequences. Deoxyribonucleic acid (DNA) was extracted with a DNA mini-prep kit and sequenced. Metagenomic sequence data was searched based on documented retrotransposase protein sequences to identify new retrotransposases. Retrotransposase proteins identified by the search were aligned to documented proteins to identify potential active sites. This metagenomic workflow resulted in the delineation of the MG140 family described herein.

### Example 2-Discovery of MG140, MG146, MG147, MG148, MG149, MG151, MG153, MG154, MG155, MG156, MG157, MG158, MG159, MG160, MG163, MG164, MG165, MG166, MG167, MG168, MG169, MG170, MG172, MG173, and MG176 Families of Retrotransposases

[0458] Metagenomic data analysis of the retrotransposase proteins identified in Example 1 revealed a new cluster of undescribed putative retrotransposase systems comprising several families (MG140, MG146, MG147, MG148, MG149, MG151, MG153, MG154, MG155, MG156, MG157, MG158, MG159, MG160, MG163, MG164, MG165, MG166, MG167, MG168, MG169, MG170, MG172, MG173, and MG176). The corresponding protein sequences for these new enzymes and their example subdomains are presented as SEQ ID NOs: 1-29, 393-735, 799-895, 1020-1476, 1544-1554, 1850-2160, 2165-2210, and 2258-2266.

### Example 3—Integration of Reverse Transcribed DNA In Vitro Activity (Prophetic)

[0459] Integrase activity can be conducted via expression in an E. coli lysate-based expression system. The components used for in vitro testing are three plasmids: an expression plasmid with the retrotransposon gene(s) under a T7 promoter, a target plasmid, and a donor plasmid which contains 5′ and 3′ UTR sequences recognized by the retrotransposase around a selection marker gene (e.g., Tet resistance gene). The lysate-based expression products, target DNA, and donor plasmid are incubated to allow for transposition to occur. Transposition is detected via PCR. In addition, the transposition product will be tagmented with T5 and sequenced via NGS to determine the insertion sites on a population of transposition events. Alternatively, the in vitro transposition products can be transformed into E. coli under antibiotic (e.g., Tet) selection, where growth occurs when the selection marker is stably inserted into a plasmid. Either single colonies or a population of E. coli can be sequenced to determine the insertion sites.

[0460] Integration efficiency can be measured via ddPCR or qPCR of the experimental output of target DNA with integrated cargo, normalized to the amount of unmodified target DNA also measured via ddPCR.

[0461] This assay may also be conducted with purified protein components rather than from lysate-based expression. In this case, the proteins are expressed in E. coli protease-deficient B strain under T7 inducible promoter, the cells are lysed using sonication, and the His-tagged protein of interest is purified using Ni-NTA affinity chromatography on a FPLC. Purity is determined using densitometry of the protein bands resolved on SDS-PAGE and coomassie stained acrylamide gels. The protein is desalted in storage buffer composed of 50 mM Tris-HCl, 300 mM NaCl, 1 mM TCEP, 5% glycerol; pH 7.5 (or other buffers as determined for maximum stability) and stored at −80° C. After purification the transposon gene(s) are added to the target DNA and donor plasmid as described above in a reaction buffer, for example 26 mM HEPES pH 7.5, 4.2 mM TRIS pH 8, 50 μg/mL BSA, 2 mM ATP, 2.1 mM DTT, 0.05 mM EDTA, 0.2 mM MgCl₂, 30-200 mM NaCl, 21 mM KCl, 1.35% glycerol, (measured pH 7.5) supplemented with 15 mM MgOAc₂.

### Example 4—Retrotransposon End Verification Via Gel Shift (Prophetic)

[0462] The retrotransposon ends are tested for retrotransposase binding via an electrophoretic mobility shift assay (EMSA). In this case, a target DNA fragment (100-500 bp) is end-labeled with FAM via PCR with FAM-labeled primers. The 3′ UTR RNA and 5′ UTR RNA are generated in vitro using T7 RNA polymerase and purified. The retrotransposase proteins are synthesized in an in vitro transcription/translation system. After synthesis, 1 μL of protein is added to 50 nM of the labeled DNA and 100 ng of the 3′ or 5′ UTR RNA in a 10 μL reaction in binding buffer (e.g., 20 mM HEPES pH 7.5, 2.5 mM Tris pH 7.5, 10 mM NaCl, 0.0625 mM EDTA, 5 mM TCEP, 0.005% BSA, 1 μg/mL poly(dI-dC), and 5% glycerol). The binding is incubated at 30° for 40 minutes, then 2 μL of 6× loading buffer (60 mM KCl, 10 mM Tris pH 7.6, 50% glycerol) is added. The binding reaction is separated on a 5% TBE gel and visualized. Shifts of the 3′ or 5′ UTR in the presence of retrotransposase protein and target DNA can be attributed to successful binding and are indicative of retrotransposase activity. This assay can also be performed with retrotransposase truncations or mutations, as well as using E. coli extract or purified protein.

### Example 5—Cleavage of Target DNA Verification (Prophetic)

[0463] To confirm that the retrotransposase is involved in cleavage of target DNA, short (~140 bp) DNA fragments are labelled at both ends with FAM via PCR with FAM-labeled primers. In vitro transcription/translation retrotransposase products are pre-incubated with 1 μg of Rnase A (negative control), or 3′ UTR, 5′ UTR or non-specific RNA fragments (control), followed by incubating with labeled target DNA at 37° C. The DNA is then analyzed on a denaturing gel. Cleavage of one or both strands of DNA can result in labelled fragments of various sizes, which migrate at different rates on the gel.

### Example 6—Integrase Activity in E. coli (Prophetic)

[0464] Engineered E. coli strains are transformed with a plasmid expressing the retrotransposon genes and a plasmid containing a temperature-sensitive origin of replication with a selectable marker flanked by 5′ and 3′ UTR of the retrotransposon involved in integration. Transformants induced for expression of these genes are then screened for transfer of the marker to a genomic target by selection at restrictive temperature for plasmid replication and the marker integration in the genome is confirmed by PCR.

[0465] Integrations are screened using an unbiased approach. In brief, purified gDNA is tagmented with Tn5, and DNA of interest is then PCR amplified using primers specific to the Tn5 tagmentation and the selectable marker. The amplicons are then prepared for NGS sequencing. Analysis of the resulting sequences is trimmed of the transposon sequences and flanking sequences are mapped to the genome to determine insertion position, and insertion rates are determined.

### Example 7—Integration of Reverse Transcribed DNA into Mammalian Genomes (Prophetic)

[0466] To show targeting and cleavage activity in mammalian cells, the integrase proteins are purified in E. coli or sf9 cells with 2 NLS peptides either in the N, C or both terminus of the protein sequence. In this procedure, a plasmid containing a selectable neomycin resistance marker (NeoR), or a fluorescent marker flanked by the 5′ and 3′ UTR regions involved in transposition and under control of a CMV promoter is synthesized. Cells are be transfected with the plasmid, recovered for 4-6 hours for RNA transcription, and subsequently electroporated with purified integrase proteins. Antibiotic resistance integration into the genome is quantified by G418-resistant colony counts (selection to start 7 days post-transfection), and positive transposition by the fluorescent marker is assayed by fluorescence activated cell cytometry. 7-10 days after the second transfection, genomic DNA is extracted and used for the preparation of an NGS library. Off target frequency is assayed by fragmenting the genome and preparing amplicons of the transposon marker and flanking DNA for NGS library preparation. At least 40 different target sites are chosen for testing each targeting system's activity.

[0467] Integration in mammalian cells can also be assessed via RNA delivery. An RNA encoding the retrotransposase with 2 NLS is designed, and cap and polyA tail are added. A second RNA is designed containing a selectable neomycin resistance marker (NeoR) or a fluorescent marker flanked by the 5′ and 3′ UTR regions. The RNA constructs are introduced into mammalian cells via liposome based transfection reagent. 10 days post-transfection, genomic DNA is extracted to measure transposition efficiency using ddPCR and NGS.

### Example 8—Bioinformatic Discovery of RTs

[0468] An extensive assembly-driven metagenomic database of microbial, viral, and eukaryotic genomes was mined to retrieve predicted proteins with reverse transcriptase function. Over 4.5 million RT proteins were predicted on the basis of having a hit to the Pfam domains PF00078 and PF07727, of which 3.4 million had a significant e-value (<1×10⁻⁵). After filtering for complete ORFs with an RT (reverse transcriptase) domain coverage of ≥70%, and with predicted catalytic residues ([F/Y]XDD), nearly half a million proteins were retained for further analysis. The RT domains were extracted from this set of proteins, as well as from reference sequences retrieved from public databases. The domain sequences were clustered at 50% identity over 80% coverage with Mmseqs2 easy-cluster, representative sequences (26,824 in total) were aligned, and the domain alignment was used to infer a phylogenetic tree. Phylogenetic analysis of RT domains suggest that many different classes of RTs with high sequence diversity were recovered (FIG. 4).

### Example 9—Example Non-LTR Retrotransposons (MG140, MG146, MG147, MG148, and MG149 Families)

### Retrotransposon Bioinformatic Analysis

[0469] Non long terminal repeat (non-LTR) retrotransposases are capable of integrating large cargo into a target site via reverse transcription of an RNA template. Non-LTR retrotransposases were identified within the R2/R4 and LINE clades from the phylogenetic tree in FIG. 4. Full-length proteins containing RT domains classified as R2, R4, and LINEs were clustered at 99% sequence identity, and representative sequences were aligned. A phylogenetic tree was inferred from this alignment and R2/R4 retrotransposase families, as well as other RT-related families, were delineated (FIG. 5A).

[0470] R2s are non-LTR retrotransposons that integrate cargo via target-primed reverse transcription (TPRT). Many R2 enzymes of the MG140 family contain an RT domain, as well as endonuclease domain and multiple Zn-binding ribbon motifs that delineate Zn-Fingers (FIGS. 5B and 6A). Some R2 retrotransposons integrate into the 28S rDNA, as shown by the boundaries of the MG140-47 (SEQ ID NO: 395) R2 retrotransposon flanked by fragments of a 28S rDNA gene (FIG. 6B). Other retrotransposons integrate into the 18S rRNA gene and contain a polyA or polyT tail that defines the 3′ end of the transposon (FIG. 7). It is possible that the exact target binding site, as well as 5′-UTR, 3′-UTR, and poly-T are involved in accurate and specific integration.

[0471] The retrotransposon MG146-1 (SEQ ID NO: 402), which was derived from an Archaeal genome, contains an RT domain, Zn-binding ribbon motifs, and an endonuclease domain, and the domain architecture within the enzyme differs from that of other single ORF non-LTR retrotransposons (FIG. 8A).

[0472] MG147 family member MG140-17-R2 (SEQ ID NO: 18) retrotransposon is organized into three ORFs flanked by 5′ and 3′ UTRs (FIG. 8B). The RNA recognition motif (RRM) gene is likely involved in recognition of the RNA template, while the endonuclease gene is likely involved in recognition and nicking of the target site. ORF three is the enzyme responsible for reverse transcription of the template and contains an RT domain, Zn-binding ribbon motifs, and an RNAse-H domain.

[0473] Family MG148 includes extremely divergent RT homologs, predicted to be active by the presence of all expected catalytic residues. Alignment at the nucleotide level for several family members uncovered conserved regions within the 5′ UTR, which are possibly involved in RT function, activity or mobilization (FIG. 9B).

Testing the In Vitro Activity of Retrotransposon RTs (Reverse Transcriptases) by qPCR

[0474] The in vitro activity of retrotransposon RTs was assessed by a primer extension reaction containing RT enzyme derived from a cell-free expression system and 100 nM of RNA template (200 nt) annealed to a DNA primer in reaction buffer containing 40 mM Tris-HCl (pH 7.5), 0.2 M NaCl, 10 mM MgCl₂, 1 mM TCEP, and 0.5 mM dNTPs. The resulting full-length cDNA product was quantified by qPCR by extrapolating values from a standard curve generated with the DNA template of specific concentrations.

[0475] MG140-3 (SEQ ID NO: 3), MG140-6 (SEQ ID NO: 6), MG140-7 (SEQ ID NO: 7), MG140-8 (SEQ ID NO: 8), MG140-13 (SEQ ID NO: 14), and MG146-1 (SEQ ID NO: 402) are active via primer extension (FIGS. 10 and 11). Preliminary assessment of fidelity was performed for MG140-3 and MG146-1, resulting in a relative error rate 1.5 and 1.35-times higher than MMLV, respectively (FIG. 12). For fidelity measurements, the resulting full-length cDNA product generated in the primer extension assay described above was PCR-amplified, library-prepped, and subjected to next generation sequencing. Trimmed reads were aligned to the reference sequence and the frequency of misincorporation was calculated.

### Integration Site

[0476] Some non-LTR retrotransposons (e.g., MG140 family such as MG140-1) are predicted to integrate into the 28S rDNA gene by targeting specific GGTGAC motifs, with the insertion site between the second (G) and third (T) positions. The N-terminus of such retrotransposon proteins contains three zinc (Zn) fingers (two of the CCHH type and one of type CCHC), which are followed by the reverse transcriptase (RT) domain with a YADD (SEQ ID NO: 2269) active site. The C-terminus of such retrotransposon proteins includes an endonuclease domain with an additional CCHC Zn-finger. The protein is flanked by 5′ and 3′ UTRs that are 289 and 478 bp long, respectively (FIG. 31).

### Example 10—Group II Intron RTs (MG153, MG163, MG164, MG165, MG166, MG167, MG168, MG169, and MG170 Families)

### Group II Bioinformatic Analysis

[0477] Group II introns are capable of integrating large cargo into a target site via reverse transcription of an RNA template. RT domains from Group II introns were identified and delineated in the phylogenetic tree in FIG. 4. Over 10,000 unique full-length Group II intron proteins containing RT domains from contigs with >2 kb of sequence flanking the RT enzyme were aligned. A phylogenetic tree was inferred from this alignment and Group II intron families were further identified (FIGS. 13A-13B). Group II intron enzymes can be classified into classes A-G, ML, and CL, and their domain architecture includes an RT domain predicted to be active, as well as a maturase domain involved in intron mobilization. Some Group II intron proteins contain an additional endonuclease domain likely involved in target recognition and cleavage. Many candidates from all families identified were nominated for further characterization.

### Testing the In Vitro Activity of Group II Intron RTs Class C, D, and F

[0478] The in vitro activity of GII intron Class C (MG153), Class D (MG165), and Class F (MG167) RTs was assessed by a primer extension reaction containing RT enzyme derived from a cell-free expression system. Expression constructs were codon-optimized for E. coli and contained an N-terminal single Strep tag. Expression of the RT was confirmed by SDS-PAGE analysis. The substrate for the reaction was 100 nM of RNA template (200 nt) annealed to a 5′-FAM labeled primer. The reaction buffer contained the following components: 50 mM Tris-HCl (pH 8.0), 75 mM KCl, 3 mM MgCl₂, 10 mM DTT, and 0.5 mM dNTPs. Following incubation at 37° C. for 1 h, the reaction was quenched via incubation with RnaseH, followed by the addition of 2×RNA loading dye. The resulting cDNA product(s) were separated on a 10% denaturing polyacrylamide gel and were visualized using visualization system. RT activity was also assessed by qPCR with primers that amplify the full-length cDNA product. Products from the primer extension assay were diluted to ensure cDNA concentrations were within the linear range of detection. The amount of cDNA was quantified by extrapolating values from a standard curve generated with the DNA template of specific concentrations.

[0479] By detection of cDNA products on a denaturing gel, the following GII intron class C candidates were active under these experimental conditions: MG153-1 through MG153-6 (SEQ ID NOs: 555-560), MG153-9 (SEQ ID NO: 563), MG153-10 (SEQ ID NO: 564), MG153-12 (SEQ ID NO: 566), MG153-13 (SEQ ID NO: 567), MG153-15 (SEQ ID NO: 569), MG153-18 (SEQ ID NO: 572), MG153-20 (SEQ ID NO: 574), MG153-29 through MG153-31 (SEQ ID NOs: 580-582), MG153-33 through MG153-37 (SEQ ID NOs: 584-588), MG153-41 (SEQ ID NO: 592), MG153-42 (SEQ ID NO: 593), MG153-45 (SEQ ID NO: 596), MG153-51 (SEQ ID NO: 602), MG153-53 (SEQ ID NO: 604), MG153-54 (SEQ ID NO: 605), and MG153-57 (SEQ ID NO: 608). (FIGS. 14A-14D and 15A-15D). Active candidates exhibit a varying degree of apparent processivity compared to the highly processive control GII Class C RTs GsI-IIC and MarathonRT, indicated by the presence of smaller cDNA drop-off products. By qPCR, the following additional candidates are also active under these experimental conditions (cDNA detected >10-fold above background): MG153-7 (SEQ ID NO: 561), MG153-8 (SEQ ID NO: 562), MG153-10 (SEQ ID NO: 564), MG153-11 (SEQ ID NO: 565), MG153-14 (SEQ ID NO: 568), MG153-17 (SEQ ID NO: 571), MG153-19 (SEQ ID NO: 573), MG153-25 through MG153-28 (SEQ ID NOs: 576-579), MG153-32 (SEQ ID NO: 583), MG153-39 (SEQ ID NO: 590), MG153-40 (SEQ ID NO: 591), MG153-43 (SEQ ID NO: 594), MG153-47 (SEQ ID NO: 598), MG153-50 (SEQ ID NO: 601), MG153-55 (SEQ ID NO: 606) and MG153-56 (SEQ ID NO: 607) (FIGS. 14D and 15D).

[0480] By detection of cDNA products on a denaturing gel, GII intron class D candidates MG165-1 (SEQ ID NO: 684) and MG165-5 (SEQ ID NO: 688) are active under these experimental conditions (FIG. 16A). By qPCR, additional candidates MG165-4 (SEQ ID NO: 687), MG165-6 (SEQ ID NO: 689), and MG165-8 (SEQ ID NO: 691) are also active under these experimental conditions (cDNA detected >10-fold above background) (FIG. 16B).

[0481] By detection of cDNA products on a denaturing gel, GII intron Class F candidates MG167-1 (SEQ ID NO: 698) and MG167-4 (SEQ ID NO: 701) are active under these experimental conditions (FIG. 17A). By qPCR, additional candidates MG167-3 (SEQ ID NO: 700) and MG167-5 (SEQ ID NO: 702) are also active under these experimental conditions (cDNA detected >10-fold above background) (FIG. 17B).

### Assessment of Relative Fidelity of GII Intron RTs

[0482] To assess the relative fidelity of GII Class C MG153 candidates, the resulting full-length cDNA product generated in the primer extension assay described above was PCR-amplified, library-prepped, and subjected to next generation sequencing. Paired reads were merged using bbmerge.sh requiring a perfect overlap and trimming all non-overlapping portions. Merged reads were then aligned to the reference template and the number of mismatches at each position relative to the reference was calculated. Of the GII Class C candidates tested, MG153-6 (SEQ ID NO: 560) and MG153-12 (SEQ ID NO: 566) have reproducibly higher error rates compared to MMLV control RT and other GII intron Class CRTs (FIG. 18).

Human Cells cDNA Synthesis Results

[0483] The ability of these enzymes to produce cDNA in a mammalian environment was tested by expressing them in mammalian cells and detecting cDNA synthesis by PCR, followed by agarose electrophoresis and D1000 TapeStation. Reverse transcriptases were cloned in a plasmid for mammalian expression under the CMV promoter as fusion proteins having MS2 coat protein (MCP) at the N terminus, in addition to a flag-HA tag (FH). MCP is a protein derived from the MS2 bacteriophage that recognizes a 20 nucleotide RNA stem loop with high affinity (subnanomolar Kd). By fusing the RTs with MCP and having the MS2 loops in the RNA template, it is ensured that once the RT is translated, it finds the RNA template and starts cDNA synthesis from the DNA primer hybridized to the RNA template.

[0484] A plasmid containing MCP fused to the RT candidate under CMV promoter was cloned and isolated for transfection in HEK293T cells. Transfection was performed using liposome based system. mRNA codifying nanoluciferase (SEQ ID NO: 33) was produced. In order to degrade any DNA template left in the mRNA preparation, the reaction was treated with Dnase for 1 hour, and the mRNA was cleaned using a transcription Clean-Up kit. The mRNA was hybridized to a complementary DNA primer (SEQ ID NO: 34) in 10 mM Tris pH 7.5, 50 mM NaCl at 95° C. for 2 min and cooled to 4° C. at the rate of 0.1° C./s. The mRNA/DNA hybrid was transfected into HEK293T cells using liposome based technology 6 hours after the plasmid containing the MCP-RT fusion was transfected. 18 hours post mRNA/DNA transfection, cells were lysed using a DNA extraction solution, 100 μL of quick extract was added per 24 well in a 24 well plate. The nanoluciferase is ~500 bp long, primers to amplify products of 100 bp and 542 bp from the newly synthesized cDNA were designed (SEQ ID NOs: 38 and 39). cDNA was amplified using the set of primers mentioned above, and PCR products were detected by agarose gel electrophoresis (FIG. 19A) or DNA Tape Station (FIG. 19B).

[0485] Activity for the control GII intron RTs Marathon, Marathon PE2, and TGIRT was detected (FIGS. 19A and 19B), as shown by the presence of a 100 bp and 500 bp DNA product. Moreover, activity for GII intron derived RTs MG153-1 through MG153-4 (SEQ ID NOs: 555-558), MG153-7 through MG153-13 (SEQ ID NOs: 561-567), MG153-15 (SEQ ID NO: 569), MG153-16 (SEQ ID NO: 570) and MG153-21 (SEQ ID NO: 575) was also shown (FIGS. 19A, 19B, and 19C). The signal of the PCR product for the RTs was similar to that of Marathon and TGIRT. Altogether, this shows that these newly discovered RTs are expressed, fold properly, and are active inside living mammalian cells, opening options for their biotechnological applications. Group II intron RTs are capable of synthesizing cDNA using modified primers

[0486] The in vitro activity of RTs was assessed by a primer extension reaction containing RT enzyme derived from a cell-free expression system. Expression constructs were codon-optimized for E. coli and contained an N-terminal single Strep tag. The substrate for the reaction was 100 nM of RNA template (202 nt) annealed to a 5′-FAM labeled DNA primer containing phosphorothioate (PS) bond modifications at various locations within the primer. Primer 1 (SEQ ID NO: 736, comprising a sequence/56-FAM/A*G*A*C*G*GTCACAGCTTGTCTG) contains 5 PS bonds at the 5′ end of the oligo. Primer 2 (SEQ ID NO: 737, comprising a sequence/56-FAM/A*G*A*C*G*GTCACAGCTT*G*T*C*T*G wherein * denotes a phosphorothioate bond) contains 5 PS bonds at both 5′ and 3 ends of the oligo. Primer 3 (SEQ ID NO: 738, comprising a sequence of/56-FAM/A*G*A*C*G*GTCACAGCTT*G*T*C*TG, wherein * denotes a phosphorothioate bond) differs from Primer 2 in that a standard bond is replaced between the two most 3′ terminal nucleotides. The reaction buffer contained the following components: 50 mM Tris-HCl (pH 8.0), 75 mM KCl, 3 mM MgCl₂, 10 mM DTT, and 0.5 mM dNTPs. Following incubation at 37° C. for 1 h, the reaction was quenched via incubation with RnaseH, followed by the addition of 2×RNA loading dye. The resulting cDNA product(s) were separated on a 10% denaturing polyacrylamide gel and were visualized using an imaging system. Based on these results, the control RTs MMLV (viral) and TGIRT-III (GII intron) are both capable of performing primer extension with all modified primers (FIG. 32). The GII intron RT MG153-9 is also capable of extending from all tested PS-modified DNA primers (FIG. 33).

Human Cells RT Expression and cDNA Synthesis Results

[0487] The ability of GII RTs to synthesize cDNA in a mammalian cell environment was tested as previously described with insubstantial modifications. cDNA synthesis was detected using PCR and analyzed by agarose gel electrophoresis or TapeStation. In order to have a quantitative readout, a qPCR assay was developed using qPCR primers already documented with a probe listed as SEQ ID NO: 739. All tested candidates of the MG153 family were active to various degrees, with activity as broad as four orders of magnitude (FIG. 34). RTs of families tested include MG153-1 through MG153-13, MG153-15, MG153-16, MG153-18, MG153-20, MG153-21, MG153-29 through MG153-31, MG153-33 through MG153-37, MG153-45, MG153-51, MG153-53, MG153-54, MG153-57, MG165-1, MG165-5, MG167-1 and MG167-4. Several RTs (MG153-15, MG153-53, MG153-4, MG153-18, MG153-20, MG153-7 and MG153-5) outperformed the TGIRT control (FIG. 34).

[0488] In order to understand protein expression and stability of the GII RTs in mammalian cells, immunoblots were performed. Briefly, transfected cells were lysed with RIPA lysis buffer supplemented with protease inhibitors (80 μL per well in a 24 well format). The lysate was centrifuged at 14,000 g for 10 min at 4° C. in order to remove insoluble aggregates. Proteins were quantified using BCA. 3 or 10 μg of total protein was loaded per lane in a 4-12% polyacrylamide SDS gel. All lanes were normalized to the same amount of protein. Proteins were transferred to a PVDF membrane using the iBlot gel transfer system. Proteins were detected by using a rabbit HA antibody, using an HRP-based detection method. Results suggest varying levels of protein expression or stability, as given by the intensity of the band (FIGS. 35A-35C). The expression of each protein was quantified and cDNA synthesis activity was normalized to total protein expression: seven MG153 RTs outperformed the TGIRT control (FIG. 36). Remarkably MG153-15 shows 10-fold higher cDNA synthesis activity than TGIRT under these conditions.

[0489] Some GII derived RTs form very stable dimers, including one of the positive controls, MarathonRT, as well as MG153-1 through MG153-4 and MG153-9 (FIGS. 35A-35C). The “CAQQ” motif (SEQ ID NO: 2267) was documented as responsible for stable dimerization in Marathon RT (Nat Struct Mol Biol. 2016 June; 23 (6): 558-565). RTs that showed stable dimer formation on immunoblots (MG153-1 through MG153-4) also contain the CAQQ (SEQ ID NO: 2267) dimerization amino acid motif (FIG. 35C). Dimerization may be an unfavorable feature due to added complexity, therefore RTs that do not form dimers may be optimal for specific biotechnological applications.

TABLE 2
Expected molecular sizes for tested RT candidates

| RT | Expected Protein Size (kDa)* |
|---|---|
| Marathon | 67.8 |
| TGIRT | 67 |
| MG153-1 | 74 |
| MG153-2 | 74 |
| MG153-3 | 74 |
| MG153-4 | 67.6 |
| MG153-7 | 71.7 |
| MG153-8 | 67.6 |
| MG153-9 | 72 |
| MG153-10 | 72.2 |
| MG153-11 | 70.9 |
| MG153-12 | 72.5 |
| MG153-13 | 67.9 |
| MG153-15 | 68.6 |
| MG153-16 | 71.7 |
| MG153-21 | 70.6 |

*Size includes a Flag-HA-MCP tag

### Example 11—G2L4 (MG172 Family)

[0490] G2L4 are RT-containing sequences distantly related to Group II introns (Group II intron-like RTs), which were identified in FIG. 4. Over 600 full-length G2L4 enzymes were aligned and a phylogenetic tree was inferred from this alignment (FIGS. 20A-20B). MG172 family members contain RT and maturase domains, and were predicted to have a conserved Y[I/L]DD active site motif. The motif YIDD (SEQ ID NO: 2270) was recently reported to display increased efficiency with shorter DNA primers in one G2L4 reference. MG172 enzymes have an average length of 425 aa and share 32% AAI, which highlights the improvement of these systems.

### Example 12—LTR Retrotransposons (MG151 Family)

### LTR Retrotransposon Bioinformatic Analysis

[0491] Long terminal repeat (LTR) retrotransposons integrate into their target sites via reverse transcription of an RNA template. The MG151 family of LTR retrotransposons, which include retroviral and non-viral transposons, was identified in the phylogenetic tree in FIG. 4. Full-length proteins containing LTR RT domains were aligned. A phylogenetic tree was inferred from this alignment (FIG. 21A). More than 100 non-viral and retroviral RT enzymes of the MG151 family contain RT and RnaseH domains, and are predicted to be active based on the presence of catalytic residues. The LTR RT polyprotein also encodes protease and integrase domains in a similar architecture seen for HIV and MMLV LTR RTs (FIGS. 21A, 21B, 21C, and 22). The RT and other genes, such as gag or envelope, are flanked by long imperfect long terminal repeats (FIG. 21B). MG151 family members are diverse and new, sharing 30% amino acid identity (FIG. 22).

[0492] The polyprotein of LTR retrotransposons is naturally processed into protease, RT and Rnase H, and integrase functional units. Therefore, the MG151 RT-RNAse H functional unit boundaries were determined by a combination of sequence and structural alignments. The 3D structure for MG151 polyproteins was predicted and visualized. For example, for MG151-82 (SEQ ID NO: 457), the predicted 3D structure identified discrete protease, RT, RNAseH, and integrase domains separated by unstructured linker regions (FIG. 21C). Therefore, the RT-RNAse H functional unit was determined as the two relevant structural domains flanked by unstructured loops. Trimmed variants containing RT and RNAse H domains were nominated for synthesis and laboratory characterization.

### Testing the In Vitro Activity of LTR Retrotransposon RTs

[0493] The in vitro activity of LTR retrotransposon RTs (MG151) was assessed by a primer extension reaction containing RT enzyme derived from a cell-free expression system and RNA template annealed to a 5′-FAM labeled primer as described above, in reaction buffer containing 50 mM Tris-HCl pH 8, 75 mM KCl, 3 mM MgCl₂, 1 mM TCEP, and 0.5 mM dNTPs. The resulting cDNA product(s) were separated on a denaturing polyacrylamide gel and visualized using an imaging system. Based on these results, MG151-80 through MG151-84 (FIG. 23A), as well as MG151-87 through MG151-90 (SEQ ID NOs: 524-527), and MG151-92 through MG151-95 (SEQ ID NOs: 529-532) (FIG. 23B) can synthesize cDNA in vitro.

[0494] To determine assay conditions under which in vitro activity is observed for Ty3, a control LTR retrotransposon RT, the following four reaction buffers were tested: Buffer A (40 mM Tris-HCl pH 7.5, 0.2 M NaCl, 10 mM MgCl₂, 1 mM TCEP); Buffer B (20 mM Tris pH 7.5, 150 mM KCl, 5 mM MgCl₂, 1 mM TCEP, 2% PEG-8000); Buffer C (10 mm Tris-HCl pH 7.5, 80 mm NaCl, 9 mm MgCl₂, 1 mM TCEP, 0.01% (v/v) Triton X-100); and Buffer D (10 mM Tris pH 7.5, 130 mM NaCl, 9 mM MgCl₂, 1 mM TCEP, 10% glycerol). In vitro activity was observed for Buffers A and B (FIG. 23C).

### Testing Priming Parameters and Processivity on a Structure RNA Template

[0495] To determine the reverse transcriptase activity of these LTR RTs on a structured RNA template, different primers of length 6, 8, 10, 13, 16, and 20 nt were annealed onto a structured RNA scaffold. These annealed RNA/DNA hybrids were used in a cDNA generation assay equivalent to those used for overall activity. As shown in FIGS. 24A-24B, MMLV is active on a structured RNA with a primer binding site from 10-20 nt and extends the template completely to the 5′ end, opening up all structure in the template. MG151-89 (SEQ ID NO: 526) is active with primer lengths of 13-20 and can extend approximately 18 nt, the length of pegRNA until the sgRNA scaffold hairpin is reached. MG151-92 (SEQ ID NO: 529) and MG151-97 (SEQ ID NO: 534) were not active on this template at our level of detection.

### Example 13—Retron RTs (MG154, MG155, MG156, MG157, MG158, MG159, and MG160 Families)

### Retron Bioinformatic Analysis

[0496] Bacterial retrons are DNA elements of approximately 2000 bp in length that encode an RT-coding gene (ret) and a contiguous non-coding RNA containing inverted sequences, the msr and msd. Retrons employ a unique mechanism for RT-DNA synthesis, in which the ncRNA template folds into a conserved secondary structure, insulated between two inverted repeats (a1/a2). The retron RT recognizes the folded ncRNA, and reverse transcription is initiated from a conserved guanosine 2′OH adjacent to the inverted repeats, forming a 2′-5′ linkage between the template RNA and the nascent cDNA strand. In some retrons this 2′-5′ linkage persists into the mature form of processed RT-DNA, while in others an exonuclease cleaves the DNA product resulting in a free 5′ end. Moreover, the RT targets the msr-msd derived from the same retron as its RNA template, providing specificity that may avoid off-target reverse transcription.

[0497] Over 4031 RT domain sequences were identified as retron RTs in the phylogenetic tree in FIG. 4. A subset of 2407 full-length retron protein sequences were selected for further analysis based on the presence of catalytic residues (xxDD) and conserved motifs documented in retron RTs (NaxxH and VTG) (FIGS. 25 and 26). Retrons of families MG154-MG159 and MG173 include members that range between 300 and 650 aa in length, and their 5′ UTR contains predicted ncRNA (msr-msd) trimmed flanked by inverted repeats (FIGS. 27A-27B).

[0498] In addition, a divergent group of “retron-like” single-domain RT sequences were identified within the retron clade in FIG. 4. The single-domain RTs of the MG160 family range between 250 and 300 aa and are predicted to be active based on the presence of expected RT catalytic residues [F/Y]XDD. Although there is a lack of retron RT crystal and cryo-EM structures in public databases, 3D structure prediction of MG160-3 (SEQ ID NO: 629) indicates a conserved RT domain that aligns with a Group II intron RT domain (FIGS. 28A and 28B). The 5′ UTR of the MG160 family are conserved among family members and fold into conserved secondary structures (FIG. 28C) that are likely important for element activity or mobilization.

### In Vitro Activity of MG154, MG155, MG156, MG157, MG158, and MG159 Family of Retron-Like RTs

[0499] The in vitro activity of retron RTs on a general RNA template was assessed by a primer extension reaction containing RT enzyme derived from a cell-free expression system. Expression constructs were codon-optimized for E. coli and contained an N-terminal single Strep tag. The substrate for the reaction was 100 nM of RNA template (202 nt) annealed to a 5′-FAM labeled primer. The reaction buffer contained the following components: 50 mM Tris-HCl (pH 8.0), 75 mM KCl, 3 mM MgCl₂, 10 mM DTT, and 0.5 mM dNTPs. Following incubation at 37° C. for 1 h, the reaction was quenched via incubation with RnaseH, followed by the addition of 2×RNA loading dye. The resulting cDNA product(s) were separated on a 10% denaturing polyacrylamide gel and were visualized using an imaging system. Based on these results, the following retron RTs are capable of performing primer extension on a general RNA template that is not their own ncRNA: MG155-2 (SEQ ID NO: 612), MG155-3 (SEQ ID NO: 613), MG156-2 (SEQ ID NO: 617), MG157-5 (SEQ ID NO: 622), and MG159-1 (SEQ ID NO: 624).

### In Vitro Activity of MG160 Family of Retron-Like RTs

[0500] The in vitro activity of retron-like RTs (MG160 family) was assessed by a primer extension reaction containing RT enzyme derived from a cell-free expression system. Expression constructs were codon-optimized for E. coli and contained an N-terminal single Strep tag. The substrate for the reaction was 100 nM of RNA template (200 nt) annealed to a 5′-FAM labeled primer. The reaction buffer contained the following components: 50 mM Tris-HCl (pH 8.0), 75 mM KCl, 3 mM MgCl₂, 10 mM DTT, and 0.5 mM dNTPs. Following incubation at 37° C. for 1 h, the reaction was quenched via incubation with RnaseH, followed by the addition of 2×RNA loading dye. The resulting cDNA product(s) were separated on a 10% denaturing polyacrylamide gel and were visualized using an imaging system. RT activity was also assessed by qPCR with primers that amplify the full-length cDNA product. Products from the primer extension assay were diluted to ensure cDNA concentrations were within the linear range of detection. The amount of cDNA was quantified by extrapolating values from a standard curve generated with the DNA template of documented concentrations.

[0501] By gel analysis, MG160-1 through MG160-4 (SEQ ID NOs: 627-630) and MG160-6 (SEQ ID NO: 633) are active and had diminished processivity compared to GsI-IIC, a control GII intron Class C RT (FIGS. 29A-29B). Processivity appears more similar to that of MMLV, a retroviral control RT that produces a similar drop-off pattern of cDNA products (FIG. 29A). By qPCR, MG160-1 through MG160-4 (SEQ ID NOs: 627-630) can produce full-length cDNA, while MG160-6 (SEQ ID NO: 633) produced a less than full-length product (FIG. 29B).

Cell-Free Expression of Retron RTs (MG154, MG155, MG156, MG157, MG158, MG159, and MG173 Families) and In Vitro Transcription of Retron ncRNAs

[0502] Retron RTs were produced in a cell-free expression system by incubating 10 ng/μL of a DNA template encoding the E. coli-optimized gene with an N-terminal single Strep tag with the in vitro expression components for 2 h at 37° C. All tested retron RTs (MG156-1 (SEQ ID NO: 616), MG156-2 (SEQ ID NO: 617), MG157-1 (SEQ ID NO: 618), MG157-2 (SEQ ID NO: 619), MG157-5 (SEQ ID NO: 622), MG159-1 (SEQ ID NO: 624)) were produced as indicated by SDS-PAGE analysis (FIGS. 30A and 30B).

[0503] The retron ncRNAs were generated using the a T7 in vitro transcription kit and a DNA template encoding the respective ncRNA gene following a T7 promoter. The reaction is then incubated with Dnase-I to eliminate the DNA template and then purified by an RNA cleanup kit. Quantity of the ncRNA was determined, and the purity was assessed (FIG. 30C).

### Example 14—Testing Retron RT In Vitro Activity (Prophetic)

[0504] The retron RT enzyme is produced in a cell-free expression system using a construct containing an E. coli codon-optimized gene with an N-terminal single Strep tag as described above. Expression of the enzyme is confirmed by SDS-PAGE analysis. Retron RT activity on a general template is determined by primer extension assay as described above, containing a 200 nt RNA annealed to a 5′-FAM labeled DNA primer. The resulting cDNA product(s) are detected on a denaturing polyacrylamide gel or by qPCR with primers specific for the full-length cDNA product.

[0505] Retron RT in vitro activity on its own ncRNA is assessed in a reaction containing buffer, dNTPs, the retron RT produced from a cell-free expression system, and the refolded ncRNA. RT activity before and after purification of the RT from the cell-free expression system via the N-terminal single Strep tag is compared. After incubation, half of the reaction is treated with Rnase A/T1. Products before and after Rnase A/T1 treatment are evaluated on a denaturing polyacrylamide gel and visualized. In this procedure, Rnase A/T1 is understood to digest away the RNA template and result in a mass shift towards a smaller product containing the ssDNA. Since Rnase H is expected to improve homogeneity of the 5′ and 3′ ssDNA boundaries, the impact of Rnase H on the distribution of products is also evaluated by gel analysis. The covalent linkage between the ncRNA template and ssDNA is confirmed by incubating the RT product with a 5′ to 3′ ssDNA exonuclease (RecJ) before or after treatment with a debranching enzyme (DBR1). RecJ is expected to be able to degrade the ssDNA after DBR1 has removed the 2′-5′ phosphodiester linkage between the RNA and ssDNA.

### Example 15—Determining Retron msr-msd Boundaries by NGS (Prophetic)

[0506] The msr-msd boundaries are determined by unbiased ligation of adapter sequences to the 5′ and 3′ end of the msDNA product after removal of the 2′-5′ phosphodiester linkage by DBR1. The resulting ligated product is PCR-amplified, library prepped, and subjected to next generation sequencing. Sequencing reads are aligned to the reference sequence to determine the 5′ and 3′ boundaries of the msd. The impact of the presence of Rnase H in the RT reaction on the homogeneity of 5′ and 3′ msd boundaries is also evaluated.

### Example 16—Systematic Evaluation of Insertion Sequences into the Msd on RT Activity (Prophetic)

[0507] Sequences of distinct length, predicted secondary structure, and GC-content are inserted into the msd at select insertion sites informed by the msd boundaries determined by NGS and secondary structure predictions of the ncRNA. The impact of these insertion sequences on RT activity are assessed by gel analysis or NGS as described above.

### Example 17—Testing the In Vitro Activity of RTs (Prophetic)

[0508] RT activity is assessed using a primer extension assay containing the RT derived from a cell-free expression system and an RNA template annealed to a DNA primer as described above. The resulting cDNA product(s) are detected by a denaturing polyacrylamide gel and qPCR as described above. Detection of cDNA drop-off products on the denaturing gel provides a relative assessment of processivity for candidates.

### Example 18—Evaluating the Priming Parameters of RTs (Prophetic)

[0509] Optimal primer length is determined by testing the RT's activity on an RNA template annealed to 5′-FAM labeled DNA primers of either 6, 8, 10, 13, 16, or 20 nucleotides in length. The RT is derived from a cell-free expression system as described above. After incubating the reaction, the reaction is quenched via the addition of Rnase H. The size distribution of cDNA products is analyzed on a denaturing polyacrylamide gel as described above. Optimal primer length is determined as the length that enables the RT to convert the most primer into cDNA product. The experimentally determined optimal primer length is then used in subsequent experiments, such as fidelity and processivity assays, to further characterize the RT in vitro.

### Example 19—Evaluating RT Fidelity (Prophetic)

[0510] To account for errors introduced during PCR and sequencing, RT fidelity is assessed by a primer extension assay as described above with the exception that a 14-nt unique molecular identifier (UMI) barcode is included in the primer for the reverse transcription reaction. The resulting full-length cDNA product is PCR-amplified, library-prepped, and subjected to next-generation sequencing. Barcodes with >5 reads are analyzed. After aligning to the reference sequence, mutations, insertions, and deletions are counted if the error is present in all sequence reads with the same barcode. Errors present in one but not all sequencing reads are considered to be introduced during PCR or sequencing. Further analysis of substitution, insertion, and deletion profile is performed, in addition to identification of mutation hotspots within the RNA template. The fidelity measurements are also performed with modified bases, e.g., pseudouridine, in the template.

### Example 20—Determining the Processivity Coefficient of RTs (Prophetic)

[0511] RT processivity is evaluated using a primer extension assay containing the RT enzyme derived from a cell-free expression system as described above and RNA templates between 1.6 kb-6.6 kb in length annealed to either a 5′-FAM labeled primer (for gel analysis) or unlabeled primer (for sequencing analysis).

[0512] Reverse transcription reactions are performed under single cycle conditions to disfavor rebinding of RT enzymes that have dropped off the RNA template during cDNA synthesis. The optimal trap molecule and concentration to achieve single cycle conditions are experimentally determined. The selected conditions are designed to provide sufficient inhibition of cDNA synthesis if incubated before reaction initiation but otherwise are designed to not impact the velocity of the reaction. Optimal trap molecules to test include unrelated RNA templates and unrelated RNA templates annealed to DNA primers of various lengths.

[0513] Once single cycle reaction conditions have been optimized, processivity is evaluated by initiating the reaction with the addition of dNTPs and the selected trap molecule after pre-equilibrating the RT with the RNA template annealed to a DNA primer in the reaction buffer. After incubating the reaction, the reaction is quenched by the addition of RnaseH. The size distribution of cDNA products is analyzed on a denaturing polyacrylamide gel as described above or subjected to PCR and library prepped for long-read sequencing. From these experiments, a processivity coefficient is quantified as the template length which yields 50% of the full-length cDNA product. The median length of the cDNA product from the single cycle primer extension reaction is used to estimate the probability that the RT will dissociate on the tested template. From this, the probability that the RT will dissociate at each nucleotide position is calculated, assuming that each dissociation is an independent event and that the probability of dissociation is equal at all nucleotide positions. The processivity coefficient representing the length of template at 50% of RT dissociated is then determined as 1/(2*P_{d}), where P_{d} is the probability of dissociation at each nucleotide.

### Example 21—Systematic Analysis of Challenge Structures on Primer Extension (Prophetic)

[0514] To evaluate the impact of challenging templates on RT activity, a primer extension reaction is conducted as stated above, with modifications. The RNA template contains one of the following challenge motifs at fixed distance (100-300 nt) downstream of the primer binding site: homopolymeric stretches, thermodynamically stable GC-rich stem loop, pseudoknot, tRNA, GII intron, and RNA template containing base or backbone modifications (e.g., pseudouridine, phosphothiorate bonds). After quenching the reaction, the size distribution of cDNA products is analyzed by denaturing polyacrylamide gel. An adapter sequence is also unbiasedly ligated to the 3′ ends of the cDNA products using T4 ligase. The ligated product(s) are then PCR-amplified and library prepped for next generation sequencing to identify both sites of RT misincorporation/insertions/deletions and sites of RT drop-off with single nucleotide resolution. Extent of RT drop-off at a given position is quantified by comparing the number of sequencing reads corresponding to the drop-off product to the number of sequencing reads corresponding to the full-length product.

### Example 22—Evaluating Non-Templated Base Additions (Prophetic)

[0515] Non-templated addition of bases to the 5′ end of the cDNA product is evaluated by next generation sequencing. Primer extension reactions containing the RT derived from the cell-free expression system and RNA template are conducted as described above. Systematic analysis of different RNA template lengths and sequence motifs at the 5′ end are tested. An adapter sequence is unbiasedly ligated to the 3′ ends of the resulting cDNA products by T4 ligase, resulting in capture of all cDNA products despite the potential heterogeneous nature of their 3′ ends. The ligated product(s) are then PCR-amplified and library prepped for next generation sequencing. Comparison of the expected full-length cDNA reference sequence to experimentally produced cDNA sequences that are longer than full-length enable identification of both the type and number of base additions to the 5′-end that were not templated by the RNA.

### Example 23—Determining 5′ and 3′ UTR Parameters for Activity and Processivity for R2, Non-LTR, and Similar Systems (Prophetic)

[0516] Proteins of interest are purified via a Twin-strep tag after IPTG-induced overexpression in E. coli. Purified proteins are tested against 1 kb and 4 kb cargos flanked by the 3′ UTRs identified from their native contexts and the 5′ UTRs plus 400 bp past the start codon. The 5′ and 3′ flanking sequences' effect on activity is assayed via qPCR to sections near the end of the template to determine if cargos with these native features produce superior results.

### Example 24—RT cDNA Synthesis Activity can be Harnessed for Multiple Applications (Prophetic)

[0517] Processes dependent on RNA are important in biology, such as expression, processing, modifications, and half-life. Quality control procedures in biotechnology performed on RNA utilize conversion of RNA to cDNA. Therefore, multiple RTs have been used for the production of cDNA libraries over the years. RTs used for these purposes include the MMLV RT, AMV RT, and GsI-IIC RT (TGIRT). The first two represent retroviral RTs, while the latter is a GII intron derived RT. GII intron derived RTs, as well as non-LTR derived RTs, show several advantages compared to their retroviral counterparts. For example, they are more processive, reading through structural and modified RNAs. Structural or modified RNAs may not be optimal substrates for retroviral RTs, as they create early termination products that can be misinterpreted as RNA fragments. In addition, the ability to template switch of some RTs can be harnessed for early adaptor addition, making the adaptor ligation procedures less important during library preparation. Therefore, highly processive RTs are suitable for the generation of libraries with complex RNA. Further, some highly processive RTs are generally smaller than currently used retroviral RTs, making their production and associated downstream processes easier. Several RTs described herein outperform the commercially available TGIRT enzyme, some with over 10-fold its cDNA synthesis activity.

### Example 25—LTR Restrotransposon RTs (MG151 Family)

[0518] Long terminal repeat (LTR) retrotransposons, endogenous retroviruses, and proviral retroviruses integrate into their target sites via reverse transcription of an RNA template. Retroviral RTs of the MG151 family of LTR retrotransposons were identified from a phylogenetic tree from a multiple sequence alignment of full-length proteins containing LTR RT domains (FIG. 37A). The RT-RNAse H functional unit was determined from 3D structural predictions as the two relevant structural domains flanked by unstructured loops (FIG. 37B). Trimmed variants containing only RT and RNAse H domains were nominated for synthesis and laboratory characterization.

[0519] The in vitro activity of the LTR retrotransposon RTs family, which may include LTR retrotransposons, endogenous retroviruses, and proviral retroviruses (MG151 family), was assessed by a primer extension reaction containing RT enzyme derived from a cell-free expression system. Expression constructs were codon-optimized for E. coli. The substrate for the reaction was 100 nM of RNA template (202 nt) annealed to a 5′-FAM-labeled primer. The reaction buffer contained the following components: 50 mM Tris-HCl (pH 8.0), 75 mM KCl, 3 mM MgCl₂, 10 mM DTT, and 0.5 mM dNTPs. Following incubation at 37° C. for 1 h, the reaction was quenched via incubation with RNaseH, followed by the addition of 2×RNA loading dye. The resulting cDNA product(s) were separated on a 10% denaturing polyacrylamide gel and visualized using an imaging system. Based on these results (FIGS. 37C-37E), MG151-98 through MG151-100, MG151-105, MG151-106, MG151-111, MG151-114, MG151-117, MG151-119 through MG151-121, and MG151-123 through MG151-128 can synthesize cDNA from an RNA template in vitro.

### Example 26—Retron-Like RTs (MG154, MG155, MG156, MG157, MG158, MG159, MG160, and MG173 Families)

[0520] The MG160 family of RTs is a divergent group of “retron-like” single-domain RT enzymes previously identified within the retron RT clade, which form a distantly branching group (FIG. 38A). The enzymes range between 250 and 300 aa and are predicted to be active based on the presence of expected RT catalytic residues [F/Y]XDD. When aligned with a reference retron RT (Ec86 retron RT from E. coli), both structural and sequence alignments indicate that the MG160 enzymes lack an N-terminal region found in retrons and display C-termini of variable lengths (FIGS. 38B-38C). Although they are phylogenetically related to retrons, the MG160 family of RTs contain specific motifs that distinguish them from known RTs. For example, MG160 RTs lack the conserved amino acid motifs NAXXH and VTG present in other retrons. Instead, MG160 enzymes contain family-specific conserved amino acid motifs AXXXH and [V/A]FN. In addition, they share conserved motifs with group II intron RTs, such as the GXXXY motif, although the motif is longer in MG160 enzymes (GX(3)YV(X)xVN) (SEQ ID NO: 2275) (FIG. 38D).

[0521] The in vitro activity of retrons and retron-like RTs (MG160 family) was assessed by a primer extension reaction as described above. Expression constructs were codon-optimized for E. coli and contained an N-terminal single Strep tag. The substrate for the reaction was 100 nM of RNA template (202 nt) annealed to a 5′-FAM-labeled primer. The reaction buffer contained the following components: 50 mM Tris-HCl (pH 8.0), 75 mM KCl, 3 mM MgCl₂, 10 mM DTT, and 0.5 mM dNTPs. Following incubation, the reaction was quenched and the resulting cDNA product(s) were visualized as described above.

[0522] Based on these results (FIGS. 38E and 38G), the following retron-like MG160 RTs are capable of synthesizing cDNA in vitro: MG160-17, MG160-28, MG160-40, MG160-54, MG160-56, MG160-58, MG160-59, MG160-63, MG160-64, and MG160-65. Notably, MG160-65 has higher apparent processivity than MMLV and other MG160 family RTs on the 202 nt RNA template as shown by the strong full-length cDNA band and lack of apparent drop offs (FIG. 38E, lane 21).

[0523] By gel analysis (FIGS. 38E-38G), the following retron-like RTs of families MG154-MG159 and MG173 have non-specific cDNA synthesis activity on a generic, noncognate RNA template in vitro: MG155-2, MG155-3, MG155-4, MG155-5, MG156-1, MG156-2, MG157-5, MG159-1, MG159-2, MG159-3, MG173-1, and MG173-2.

### Example 27—cDNA Synthesis by Group II Intron and Non-LTR R2 Retrotransposase RTs

[0524] Group II introns and non-LTR retrotransposases are capable of integrating large cargo into a target site via reverse transcription of an RNA template. These RTs integrate an RNA template via target-primed reverse transcription (TPRT), a mechanism in which cDNA synthesis is primed by the free 3′ hydroxyl group at the target DNA nick.

### Testing the In Vitro Activity of Group II Intron RTs Class a, B, C, E, G, ML and CL (MG163, MG164, MG153, MG166, MG168, MG169, and MG170 Families)

[0525] The in vitro activity of GII intron Class A (MG163), Class B (MG164), Class C (MG153), Class E (MG166), Class G (MG168), Class ML (MG169), and Class CL (MG170) RTs was assessed by a primer extension reaction as described above. Expression constructs were codon-optimized for E. coli and contained an N-terminal single Strep tag. The substrate for the reaction was 100 nM of RNA template (202 nt) annealed to a 5′-FAM-labeled primer. The reaction buffer contained the following components: 50 mM Tris-HCl (pH 8.0), 75 mM KCl, 3 mM MgCl₂, 10 mM DTT, and 0.5 mM dNTPs. Following incubation, the reaction was quenched and cDNA products visualized as described above. RT activity was also assessed by qPCR with primers that amplify the full-length cDNA product. Products from the primer extension assay were diluted to ensure cDNA concentrations were within the linear range of detection. The amount of cDNA was quantified by extrapolating values from a standard curve generated with the DNA template of known concentrations.

[0526] By detection of cDNA products on a denaturing gel (FIGS. 39A-39B), the following GII intron candidates were active under these experimental conditions: MG163-2, MG166-2, MG166-4, MG169-1, and MG169-11. Active candidates exhibited a varying degree of apparent processivity compared to the highly processive control GII Class C RT TGIRT as indicated by the presence of smaller cDNA drop-off products (i.e., MG166-2). By qPCR, the following additional candidates were also active under these experimental conditions (cDNA detected >10-fold above background): MG163-1, MG163-3, MG164-3, MG164-5, MG168-1, MG169-9, MG170-1, MG170-4, and MG170-7 (FIG. 39C).

[0527] A summary of in vitro cDNA synthesis activity across all GII intron RTs is shown in FIG. 39D. Enzyme activity relative to the control GII class C RT TGIRT was determined from qPCR quantification of full-length cDNA production as described above.

### Testing the In Vitro Activity of Non-LTR R2 Retrotransposase RTs (MG140, MG146, MG148, and MG176 Families)

[0528] The in vitro activity of non-LTR R2 and other retrotransposon-associated RTs was assessed by a primer extension reaction containing RT enzymes derived from a cell-free expression system. Expression constructs were codon-optimized for E. coli. The substrate for the reaction was 100 nM of RNA template (202 nt) annealed to a 5′-FAM-labeled primer. The reaction buffer contained the following components: 40 mM Tris-HCl (pH 7.5), 0.2 M NaCl, 10 mM MgCl₂, and 1 mM TCEP. Following incubation at 37° C. for 1 h, RT activity was assessed by qPCR with primers that amplify the full-length cDNA product as described above. An RT was considered active in vitro if cDNA product is detectable 10-fold above a cell-free expression system no-template control background. Based on these results (FIG. 40), MG140-54 through MG140-56 can perform cDNA synthesis in vitro.

### Testing the In Vitro Activity of GII Intron RTs on 4.1 kb RNA Template

[0529] The ability for GII intron RTs to reverse transcribe a long 4.1 kb RNA template was assessed by a primer extension reaction containing RT enzymes derived from a cell-free expression system. Expression constructs were codon-optimized for E. coli and contained an N-terminal single Strep tag. The substrate for the reaction was 100 nM of RNA template annealed to a DNA priming oligo. The reaction buffer contained the following components: 50 mM Tris-HCl (pH 8.0), 75 mM KCl, 3 mM MgCl₂, 10 mM DTT, and 0.5 mM dNTPs. Following incubation at 37° C. for 1 h, cDNA products were detected by Taqman qPCR using taqman probes and primers that amplify 100 bp amplicons corresponding to the beginning (FAM signal) and end (HEX signal) of the resulting cDNA product (4.1 kb). The cDNA products were quantified by extrapolating against a standard curve. The calculated % HEX/FAM represents the percentage of cDNA that corresponds to a full-length, 4.1 kb product.

[0530] Based on these results (FIGS. 41A-41B), all tested GII Class C RTs (MG153) were capable of producing appreciable amounts of full-length cDNA (at least 35%) compared to the retroviral control RT MMLV (1%). Many GII RTs (including MG153-54, MG153-18, MG153-3 through MG153-5) exhibited higher apparent processivity than the control GII RT (TGIRT) under these experimental conditions.

Human Cells cDNA Synthesis by RTs

[0531] The ability of these enzymes to produce cDNA in a mammalian environment was tested by expressing them in mammalian cells and detecting cDNA synthesis by qPCR. Reverse transcriptases were cloned in a plasmid for mammalian expression under the CMV promoter as fusion proteins having MS2 coat protein (MCP) at the N terminus, in addition to a flag-HA tag (FH). MCP is a protein derived from the MS2 bacteriophage that recognizes a 20 nucleotide RNA stem loop with high affinity (subnanomolar Kd). By fusing the RTs with MCP and having the MS2 loops in the RNA template, it is ensured that once the RT is translated, it finds the RNA template and starts cDNA synthesis from the DNA primer hybridized to the RNA template.

[0532] A plasmid containing MCP fused to the RT candidate under CMV promoter was cloned and isolated for transfection in HEK293T cells. Transfection was performed using liposome based system. mRNA codifying dCas9 fused to nanoluciferase was generated. In order to degrade any DNA template left in the mRNA preparation, the reaction was treated with Turbo DNase for 1.5 hour, and the mRNA was cleaned. The mRNA was hybridized to a complementary DNA primer in 10 mM Tris pH 7.5 and 50 mM NaCl at 95° C. for 2 min and cooled to 4° C. at a rate of 0.1° C./s. The mRNA/DNA hybrid was transfected into HEK293T cells using a liposome based transfection 6 hours after the plasmid containing the MCP-RT fusion was transfected. 18 hours post mRNA/DNA transfection, cells were lysed using DNA Extraction Solution, and 100 μL of quick extract was added per 24 well in a 24 well plate. The RNA template is ~4247 nt (SEQ ID NO: 896). Primers to amplify first and last 100 bps products from the newly synthesized cDNA (4100 bp) were designed, along with Taqman probes to quantify their amplification (SEQ ID NOs: 897-902) (FIG. 42).

[0533] Activity for the control GII intron RT TGIRT, the retroviral MMLV (WT and penta-mutant), as well as a positive control for R2, R2Tg, was detected (FIGS. 43A-431), as shown by an early amplification of the first and last 100 bp products. As expected for a low processivity RT, the retroviral RTs (MMLVs) showed high amplification levels of the first 100 bps (FAM signal), but the levels at which they completed cDNA synthesis (the last 100 bps) was lower (20-fold lower than first 100 bp, as observed by the FAM/HEX ratio signal). Group II intron-derived RTs and R2 non-LTR retrotransposon RTs showed a closer FAM/HEX ratio, demonstrating their high processivity (FIGS. 43A-431 and 44, respectively).

[0534] Most of the tested candidates showed a wide range of RT activity in mammalian cells. Candidates with high cDNA synthesis efficiency include Group II intron Class A (MG163-2), Class B (MG164-5), Class C (MG153-18, MG153-20, MG153-21, MG153-51, and MG153-53), Class E (MG166-2), Class F (MG167-4), and Class G (MG168-1). From the R2 non-LTR family, well-performing candidates include MG140-3 and MG140-8 (FIG. 44). Addition of an MCP tag fused to the RT did not affect cDNA synthesis activity and, for some candidates, it increased cDNA synthesis in mammalian cells (FIGS. 45A-45B).

### Example 28—In Vitro cDNA Synthesis of Modified RNA Template by Diverse RTs

[0535] In order determine the effect of a modified RNA template on cDNA synthesis activity for some RT candidates, a modified 202 bp RNA template was prepared by performing in vitro transcription of the template with complete replacement of uridine with N1-methyl pseudourine (m1Ψ). In vitro cDNA synthesis activity of RTs was assessed by a primer extension reaction as described above. The substrate for the reaction was 100 nM of standard U or m1Ψ-modified RNA template (202 nt) annealed to a 5′-FAM labeled primer. Following incubation, the reaction was quenched, and cDNA products ere visualized as described above. Reverse transcription activity was quantified from the denaturing gel by determining the percentage of primer converted into cDNA product(s) using imaging software.

[0536] Based on these results, MG151 RTs that demonstrated robust activity on the standard RNA template were also highly active on the m1Ψ-modified RNA template, namely MG151-119 through MG151-121 and MG151-123 through MG151-128 (FIG. 37E). This result was supported by gel quantification of primer conversion normalized to MMLV activity, which indicates that the MG151 family of RTs have similar activity levels with both RNA templates (FIG. 46A). Similarly, analysis of cDNA synthesis products on a denaturing gel (FIG. 46B) and quantification of RT activity by gel analysis or qPCR (FIGS. 46C-46D) for group II intron, R2, and retron-like MG160 candidates indicated that diverse RTs that are active with the standard RNA template maintained appreciable activity on the m1l′-modified RNA template.

### Example 29—cDNA Synthesis by Group II Intron RTs, Non-LTR Retrotransposon RTs, and Retron-Like RTs

[0537] Group II introns and non-LTR retrotransposases are capable of integrating large cargo into a target site via reverse transcription of an RNA template. These reverse transcriptases (RTs) integrate an RNA template via target primed reverse transcription (TPRT), a mechanism in which cDNA synthesis is primed by the free 3′ hydroxyl group at the target DNA nick. The MG160 family of RTs are a divergent group of “retron-like” single-domain RT enzymes previously identified within the retron RT clade, which form a distantly branching group. The enzymes are predicted to be active based on the presence of expected RT catalytic residues [F/Y]XDD.

[0538] Results: Human Cells cDNA Synthesis by RTs

[0539] The ability of RTs to produce cDNA in a mammalian environment was tested by expressing them in mammalian cells and detecting cDNA synthesis by qPCR. Reverse transcriptases were cloned in a plasmid for mammalian expression under the CMV promoter as fusion proteins having MS2 coat protein (MCP) at the N terminus, in addition to a flag-HA tag (FH). MCP is a protein derived from the MS2 bacteriophage that recognizes a 20 nucleotide RNA stem loop with high affinity (subnanomolar Kd). By fusing the RTs with MCP and having the MS2 loops in the RNA template, it is ensured that once the RT is translated it finds the RNA template and starts cDNA synthesis from the DNA primer hybridized to the RNA template.

[0540] A plasmid containing MCP fused to the RT candidate under CMV promoter was cloned and isolated for transfection in HEK293T cells. Transfection was performed using liposome based system. mRNA codifying dCas9 fused to nanoluciferase was generated. To degrade any DNA template left in the mRNA preparation the reaction was treated with DNase for 1.5 hours, and the mRNA was cleaned up using Transcription Clean-Up kit. The mRNA was hybridized to a complementary DNA primer in 10 mM Tris pH 7.5, 50 mM NaCl at 95° C. for 2 min and cooled to 4° C. at the rate of 0.1° C./s. The mRNA/DNA hybrid was transfected into HEK293T cells using liposome based system 6 hours after the plasmid containing the MCP-RT fusion was transfected. 18 hours post mRNA/DNA transfection, cells were lysed using DNA extraction solution. 100 μl of quick extract was added per 24 well in a 24 well plate. The RNA template was ~4247 nt. Primers to amplify first and last 100 bps products from the newly synthesized cDNA (4100 bp) were designed, along with taqman probes to quantify their amplification (FIG. 47A).

[0541] Activity for the control GII intron RT TGIRT, the retroviral MMLV (WT and penta-mutant) as well as a positive control for R2 RTs, R2Tg, was detected (FIGS. 47B and 47C), as shown by an early amplification of the first and last 100 bp products. As expected for a low processivity RT, the retroviral RTs (MMLVs) showed high amplification levels of the first 100 bps (FAM signal) but the levels at which they complete cDNA synthesis (the last 100 bps) was lower (20-fold lower than first 100 bp, as observed by the FAM/HEX ratio signal). Control group II intron RT TGIRT and control R2 non-LTR retrotransposon RT R2Tg showed a closer FAM/HEX ratio, demonstrating their high processivity (FIGS. 47B and 47C). Four candidates of the MG148 family of non-LTR retrotransposon RTs were tested in mammalian cells (FIG. 47B). All tested candidates showed low activity compared to the control RTs. Thirteen candidates of the MG160 family of retron-like RTs were also tested similarly. Although some candidates (namely MG160-2, MG160-4, MG160-28, MG160-40, and MG160-64) showed high activity based on high FAM fluorescence levels, they had poor processivity based on the much lower HEX fluorescence levels (FIG. 47C).

[0542] Two GII intron RTs, MG153-18 and MG153-20, were previously selected candidates owing to their high activity and processivity. Rationally engineered mutants were screened for both candidates using the above-mentioned cDNA synthesis assay in mammalian cells. Five individual point mutants and one pentamutant was screened for MG153-18 (FIG. 48). Four of the five point mutations increased RT activity without compromising processivity. MG153-18 G161K and MG153-18 S59R mutants increased RT activity by ~5 fold over WT. MG153-18 N71R and MG153-18 G119R increased activity by ~2.8 fold and ~3.6 fold over WT respectively. MG153-18 P242R led to a decrease in processivity although it marginally increased RT activity. This is likely reflected in the pentamutant as well which displays a low processivity over WT MG153-18. For MG153-20, four individual point mutants and one tetramutant was screened (FIG. 48). None of the MG153-20 variants improved activity over WT. Notably MG153-20 P226R, analogous to MG153-18 P242R, displayed low processivity likely reflected in the MG153-20 tetramutant.

[0543] Inactivating mutants for control RTs TGIRT and R2Tg, as well as previously identified selected RTs with high activity and processivity were also screened for their use as negative controls using the cDNA synthesis assay in mammalian cells (FIG. 49). All screened RT dead mutants exhibited activity at or below background (FIG. 49, indicated by a dashed horizontal line), much lower than their WT counterparts.

### Example 30—Non-Specific In Vitro Activity of MG173 and MG192 Family of Retron RTs

[0544] The in vitro activity of retron RTs on a general RNA template was assessed by a primer extension reaction containing RT enzyme derived from a cell-free expression system. Expression constructs were codon-optimized for E. coli and contained an N-terminal single Strep tag. The expression of MG173 and MG192 family of RTs from the cell-free expression system was confirmed by SDS-PAGE analysis (FIG. 51). The substrate for the reaction was 100 nM of RNA template (202 nt) annealed to a 5′-FAM labeled primer. The reaction buffer contained the following components: 50 mM Tris-HCl (pH 8.0), 75 mM KCl, 3 mM MgCl₂, 10 mM DTT, and 0.5 mM dNTPs. Following incubation at 37° C. for 1 h, the reaction was quenched via incubation with RNaseH followed by the addition of 2×RNA loading dye. The resulting cDNA product(s) were separated on a 10% denaturing polyacrylamide gel and visualized. Based on these results (FIG. 52), the following retron RTs are capable of performing primer extension on a general RNA template that is not their own ncRNA: MG173-3 (SEQ ID NO: 1546), 173-4 (SEQ ID NO: 1547), 173-8 (SEQ ID NO: 1551), and 173-10 (SEQ ID NO: 1553).

### Example 31—In Vitro Activity and Processivity of Retron RTs on 4.1 kb RNA Template

[0545] The ability for retron RTs to reverse transcribe a 4.1 kb RNA template was assessed by a primer extension reaction containing RT enzyme derived from a cell-free expression system. Expression constructs were codon-optimized for E. coli and contained an N-terminal single Strep tag. The substrate for the reaction was 100 nM of RNA template annealed to a DNA priming oligo. The reaction buffer contained the following components: 50 mM Tris-HCl (pH 8.0), 75 mM KCl, 3 mM MgCl₂, 10 mM DTT, and 0.5 mM dNTPs. Following incubation at 37° C. for 1 h, cDNA products were detected by Taqman qPCR using Taqman probes and primers that amplify 100 bp amplicons corresponding to the beginning (FAM signal) and end (HEX signal) of the resulting cDNA product (4.1 kb). The cDNA products were quantified by extrapolating against a standard curve. The calculated % HEX/FAM represents the percentage of cDNA that corresponds to a full-length, 4.1 kb product.

[0546] Based on these results (FIGS. 53A-53B), MG173-1 (SEQ ID NO: 734) and MG159-3 (SEQ ID NO: 626) have higher processivity than the control retroviral RT MMLV and positive control retron RT Ec86, where MMLV and Ec86 produce 0.8% and 0.7% full-length cDNA, respectively, and MG173-1 and MG159-3 produce 17.6% and 5.7% full-length cDNA, respectively. Several retron RTs exhibit processivity profiles similar to that of MMLV and Ec86, namely MG173-2 (SEQ ID NO: 735), MG157-5 (SEQ ID NO: 622), and MG156-1 (SEQ ID NO: 616).

### Example 32—Fidelity of Processive Reverse Transcriptases

[0547] Targetable integration of large cargo into human genomic DNA has been a long sought goal for gene editing. To date, the most efficient way to achieve large cargo integration is by using lentiviruses. However, lentiviral-mediated integration lacks the targetability feature, as integration occurs mostly randomly in open chromatin. The use of reverse transcriptases (RTs) with high processivity and high fidelity in conjunction with Cas nickases may be a viable rout to achieve large cargo integration. The Cas nickase provides targetability, whereas the RT, via a target-primed reverse transcription mechanism, integrates the large RNA cargo into mammalian gDNA. Overall, these RNA-templated Reverse Transcriptase systems composed of a Cas nickase and a highly active and processive reverse transcriptase (RT) may facilitate integration of large DNA sequences into therapeutic genomic sites of interest. To be successful, RTs must be identified that are able to synthesize cDNA with high fidelity.

[0548] The fidelity of RTs was evaluated by NGS of cDNA products generated by primer extension on a standard and modified RNA template of 202 nt in length (SEQ ID NO: 55). The standard RNA was prepared using standard in vitro transcription conditions, while the modified RNA template was prepared with 100% replacement of uridine with N1-methyl pseudouridine (m1Ψ). The primer extension reaction contained an RT enzyme derived from a cell-free expression system. Expression constructs (SEQ ID NOs: 70, 83, 85, 113, and 115) were codon-optimized for E. coli and contained an N-terminal single Strep tag. The substrate for the reaction was 100 nM of RNA template annealed to a 5′-FAM labeled primer (SEQ ID NO: 56). The reaction buffer contained the following components: 50 mM Tris-HCl (pH 8.0), 75 mM KCl, 3 mM MgCl₂, 10 mM DTT, and 0.5 mM dNTPs. Following incubation at 37° C. for 1 h, the reaction was quenched via the addition of RNAse A. The resulting cDNA products were then cleaned up via SPRI beads and ligated on the 3′ end using an adapter oligo containing a 14-nt unique molecular identifier (UMI, SEQ ID NO: 1595). The background control sample was generated by performing a 5-cycle PCR with Q5 polymerase using a plasmid template, reverse primer (SEQ ID NO: 1596), and forward primer encoding a 14-nt UMI SEQ ID NO: 1597). Ligated cDNAs or PCR products (for background samples) were then diluted to the same concentration across samples prior to performing subsequent PCR reactions with primers for Illumina library preparation (SEQ ID NO: 1598 forward primer for RT samples, SEQ ID NO: 1599 forward primer for background samples, SEQ ID NO 57 reverse primer). PCR triplicate samples were sequenced in paired-end mode for 150 cycles with a read depth of 25M. Sequencing reads were then sorted by UMI barcode, and reads that contained identical UMIs were grouped as unique molecules. Only UMI groups that contained at least 5 reads were used in downstream analysis. A consensus sequence was then generated from the reads within an UMI group. If less than 60% of the reads agreed on the identity of any individual base, the consensus was discarded. Errors in consensus sequences passing this threshold were tabulated by aligning to the expected sequence. An error rate was calculated across all consensus sequences as the frequency of base substitutions relative to the expected sequence. Other measures of RT error calculated include frequencies of other RT error types (substitution, insertion, deletion) at each position along the RNA template, base substitution preference, indel size distribution, and base incorporation preference of non-templated addition events.

[0549] Error rate analysis (FIG. 54) revealed that the positive control GII intron RT TGIRT has an error rate similar to that which has been previously determined also using an UMI-based NGS method (Zhao et al., 2018). GII intron RTs have similarly low substitution rates to that of TGIRT on the standard RNA template (U). Importantly, since the mRNA delivery platform for this system may require RNA templates to be modified, RTs retain high fidelity on the modified (m1Ψ) RNA template. Of note, the data presented are representative of two independent experiments, each of which were sequenced in PCR triplicate, and the data is reproducible.

### Example 33—cDNA Synthesis by Group II Intron RTs, Non-LTR Retrotransposon RTs, and Retron RTs

[0550] Group II introns and non-LTR retrotransposases are capable of integrating large cargo into a target site via reverse transcription of an RNA template. These reverse transcriptases (RTs) integrate an RNA template via target primed reverse transcription (TPRT), a mechanism in which cDNA synthesis is primed by the free 3′ hydroxyl group at the target DNA nick. These enzymes are predicted to be active based on the presence of expected RT catalytic residues [F/Y]XDD. Another family of RTs that can produce DNA from RNA for gene editing are retrons. These are compact retroelements that have specific sites of initiation and termination of reverse transcription that make them compelling tools for biotechnology applications (Lopez et al., 2022).

Results: Human Cells cDNA Synthesis by RTs

[0551] The ability of RTs to produce cDNA in a mammalian environment is tested by expressing them in mammalian cells and detecting cDNA synthesis by qPCR. Reverse transcriptases are cloned in a plasmid for mammalian expression under the CMV promoter as fusion proteins having MS2 coat protein (MCP) at the N terminus, in addition to a flag-HA tag (FH). MCP is a protein derived from the MS2 bacteriophage that recognizes a 20 nucleotide RNA stem loop with high affinity-subnanomolar Kd. By fusing the RTs with MCP and having the MS2 loops in the RNA template, once the RT is translated it finds the RNA template and starts cDNA synthesis from the DNA primer hybridized to the RNA template was ensured.

[0552] A plasmid containing MCP fused to the RT candidate under CMV promoter is cloned and isolated for transfection in HEK293T cells. Transfection is performed using lipofectamine 2000. mRNA (SEQ ID NO: 1600) encoding dCas9 fused to nanoluciferase is made. To degrade any DNA template left in the mRNA preparation the reaction is treated with DNase for 1.5 hours and the mRNA is cleaned up. The mRNA is hybridized to a complementary DNA primer (SEQ ID NO: 1601) in 10 mM Tris pH 7.5, 50 mM NaCl at 95° C. for 2 min and cooled to 4° C. at the rate of 0.1° C./s. The mRNA/DNA hybrid is transfected into HEK293T cells 6 hours after the plasmid containing the MCP-RT fusion was transfected. 18 hours post mRNA/DNA transfection, cells are lysed. 100 μL of quick extract is added per well in a 24 well plate. The RNA template is ~4247 nt. Primers to amplify first and last 100 bp products from the newly synthesized cDNA (4100 bp) were designed (SEQ ID NOs: 1601-1604), along with taqman probes (SEQ ID NOs: 1605-1606) to quantify their amplification (FIG. 55A).

[0553] Activity for the control retroviral MMLV (penta-mutant, SEQ ID NO: 1607 and WT, SEQ ID NO: 1608), control GII intron RT TGIRT (SEQ ID NO: 1609), as well as a positive control for R2 RTs, R2Tg (SEQ ID NO: 1610), was detected (FIGS. 55B-55D), as shown by an early amplification of the first and last 100 bp products. As expected for a low processivity RT, the retroviral RTs (MML Vs) show high amplification levels of the first 100 bps (FAM signal) but the levels at which they complete cDNA synthesis (the last 100 bps) is lower (20-fold lower than first 100 bp, as observed by the FAM/HEX ratio signal). Control group II intron RT TGIRT and control R2 non-LTR retrotransposon RT R2Tg show a closer FAM/HEX ratio, demonstrating their high processivity (FIGS. 55B-55D). Two R2 non-LTR retrotransposon RTs MG140-3 (SEQ ID NO: 1611) and MG140-8 (SEQ ID NO: 1618) as well as five GII intron RTs MG153-5 (SEQ ID NO: 1624), MG153-51 (SEQ ID NO: 1632), MG169-1 (SEQ ID NO: 1638), MG153-18 (SEQ ID NO: 1645), and MG153-20 (SEQ ID NO: 1657) were previously selected candidates owing to their high activity and processivity. Rationally engineered mutants were screened for all candidates using the above-mentioned cDNA synthesis assay in mammalian cells. Six engineered variants of MG140-3 and five engineered variants of MG140-8, belonging to the MG140 family of non-LTR retrotransposon RTs were tested in mammalian cells (FIG. 55B). All tested MG140-3 (SEQ ID NOs: 1612-1616) and MG140-8 single mutants (SEQ ID NOs: 1619-1622) showed comparable activity to the WT (MG140-3 WT and MG140-8 WT, SEQ ID NOs: 1611 and 1618) whereas the combination of all mutations (MG140-3 pentamutant and MG140-8 quadmutant, SEQ ID NOs: 1617 and 1623) was inactive based on low FAM and HEX fluorescence levels. Similarly, six engineered variants of MG153-5 were tested of which the single mutants (SEQ ID NOs: 1625-1629) had comparable activity to the WT (SEQ ID NO: 1624) while the combined pentamutant (SEQ ID NO: 1630) had low processivity (FIG. 55C). RT-domain inactivating mutant for MG153-5, MG153-5 RTdead (SEQ ID NO: 1631), exhibited activity below background (indicated by a dashed horizontal line) demonstrating its use as a negative control for comparison of RT activity (FIG. 55C). Five engineered variants of MG153-51 were tested of which three single mutants MG153-51 N31R (SEQ ID NO: 1633), MG153-51 S79R (SEQ ID NO: 1634), and MG153-51 G121K (SEQ ID NO: 1635) showed comparable activity to the WT (SEQ ID NO: 1632) whereas MG153-51 V202R (SEQ ID NO: 1636) and MG153-51 combined quadmutant (SEQ ID NO: 1637) showed low processivity (FIG. 55C). Likewise, five engineered variants of MG169-1 were tested where all single mutants (SEQ ID NOs: 1639-1642) had comparable activity to the WT (SEQ ID NO: 1638) while the combined quadmutant (SEQ ID NO: 1643) had low processivity (FIG. 55C). RT-domain inactivating mutant for MG169-1, MG169-1 RTdead (SEQ ID NO: 1644), exhibited activity below background (indicated by a dashed horizontal line) demonstrating its use as a negative control for comparison of RT activity (FIG. 55C). Additionally, five single mutants (SEQ ID NOs: 1646-1650) and six combinatorial mutants of MG153-18 (SEQ ID NOs: 1651-1656) were tested. Of note, the tetramutant (MG153-18 N71R S59R G119R G161K, SEQ ID NO: 1656) showed lower activity and processivity compared to the WT (SEQ ID NO: 1645). All other mutants showed comparable activity to the WT with MG153-18 S59R (SEQ ID NO: 1646), MG153-18 N71R (SEQ ID NO: 1647), MG153-18 G119R (SEQ ID NO: 1648), and MG153-18 G161K (SEQ ID NO: 1649) showing marginally higher activities on average than their WT counterpart (FIG. 55D). Five mutants of MG153-20 (SEQ ID NOs: 1658-1662) were also tested, and all five mutants showed comparable activity to the WT (SEQ ID NO: 1657) although more variable activity was noted for MG153-20 P226R (SEQ ID NO: 1661) and the combined quadmutant (SEQ ID NO: 1662) (FIG. 55D).

[0554] Owing to the identification of several active and processive RT candidates from the GII intron family and non-LTR retrotransposon family of RTs, more RT candidates of each of these families were screened through the mammalian cDNA synthesis assay (FIG. 56). Twenty-nine MG140 family RTs (MG140-59 to -61, -74, -81, -82, -88, -89, -96, -101, -102, -104, -123, -124, -129, -131, -133, -136, -138, -143 through -145, -149, -152, -154 through -158, SEQ ID NOs: 1663-1691) and one RT belonging to the MG176 family, MG176-2 (SEQ ID NO: 1692), were screened. The tested candidates showed a wide range of RT activity in mammalian cells. Candidates with high cDNA synthesis efficiency include MG140-74 (SEQ ID NO: 1666), MG140-88 (SEQ ID NO: 1669), MG140-89 (SEQ ID NO: 1670), MG140-104 (SEQ ID NO: 1674), MG140-131 (SEQ ID NO: 1678), MG140-133 (SEQ ID NO: 1679), and MG140-156 (SEQ ID NO: 1689) (FIG. 56A). Of these, MG140-74 and MG140-88 showed high processivity as evidenced by similar FAM and HEX fluorescence values making them promising candidates for further testing. Eight candidates of the MG169 family (MG169-12 through-19, SEQ ID NOs: 1693-1700) were tested and their activities and processivities were compared to MG169-1, the most active candidate identified from this family (FIG. 56B). However, no candidates of comparable or higher activity than MG169-1 family were identified (FIG. 56B). Along the same lines, eighty-two RT candidates of the MG153 family of GII intron derived RTs were tested (MG153-58 through -103, -105 through -119, -121 through -141, SEQ ID NO: 1701-1782) of which 1 candidate, MG153-82 (SEQ ID NO: 1725), with high cDNA synthesis activity and processivity was identified (FIG. 56C). Additionally, three candidates of the retron family of RTs were tested of which one candidate, MG159-3 (SEQ ID NO: 1785), with comparable activity and processivity to TGIRT was identified while the other two retron candidates, MG173-1 (SEQ ID NO: 1783), and MG173-2 (SEQ ID NO: 1784), had lower processivity (FIG. 56D).

[0555] Due to the slight increase in activity noted for four of five MG153-18 single mutant variants, their protein expression was compared against that of MG153-18 WT as well as MG153-20 WT and single mutants (FIG. 57A). No differences in protein expression were observed between MG153-18 WT, the more active MG153-18 single mutants and between MG153-20 WT and mutants suggesting that differences in cDNA synthesis activity are not a consequence of variation in protein expression of the RT candidates. Additionally, protein expression of promising RT candidates with high cDNA synthesis activity and processivity was tested (FIG. 57B). Protein expression of GII intron candidates, except for MG153-5, was observed to be stronger than that of the R2 family of non-LTR retrotransposons. Within the R2 candidates, the expression of MG140-3, MG140-74, and MG140-88 was observed to be stronger than that of MG140-8 (FIG. 57B).

[0556] In comparison to the GII intron RTs which are about 450 amino acids in length, the MG140 family of non-LTR retrotransposon RTs are much bigger in size at about 1200 amino acids in length on average. Shorter, trimmed variants of previously identified MG140 candidates MG140-3, MG140-3, MG140-74, and MG140-88 with high activity and processivity were assessed. Five trimmed variants of MG140-3 (SEQ ID NOs: 1786-1790) and MG140-8 (SEQ ID NO: 1793-1797) were tested, alongside their endonuclease domain inactivated (SEQ ID NOs: 1791 and 1798, respectively) and RT domain inactivated mutants (SEQ ID NO: 1792 and 1799). The C5 trims of MG140-3 (SEQ ID NO: 1789) and MG140-8 (SEQ ID NO: 1796), wherein about 200 amino acids were trimmed off the C-terminus, including the catalytic residue of the endonuclease domain D994 and D938 respectively, retained activity comparable to the WT and endonuclease domain inactivated variants. The other four trims-three N-terminus trims N1, N2, and N3 and one C-terminus trim, C4-were as inactive as the RT domain inactivated variant (FIG. 58A). This prompted the testing of exclusively the C5 trim of MG140-74 and MG140-88 (SEQ ID NOs: 1800 and 1804), which was also found to be as active as their respective WT and endonuclease domain (SEQ ID NOs: 1801 and 1805) inactivated counterparts as opposed to the inactive RT domain inactivated mutants (SEQ ID NOs: 1802, 1803, and 1806) (FIG. 58B).

### Results: CDNA Synthesis In Vitro by Retron RTs on a Generic, Short RNA Template

[0557] The in vitro activity of newly identified retron RTs (SEQ ID NOs: 2258-2266) on a general RNA template was assessed by a primer extension reaction containing RT enzyme derived from a cell-free expression system. Expression constructs were codon-optimized for E. coli with an N-terminal single Strep tag, and expression reactions were added to a primer extension reaction with 100 nM of substrate RNA template (202 nt) annealed to a 5′-FAM labeled primer. Following incubation, the reaction was quenched, the resulting cDNA product(s) were separated on a 10% denaturing polyacrylamide gel and visualized. Active retron RTs capable of performing primer extension on a generic RNA template that is not their specific ncRNA were MG157-6 and MG157-12 (FIG. 84). Given that retron RTs are predicted to be active based on the presence of key catalytic residues, results do not rule out the possibility that these RTs are active on a different RNA template.

### Results: CDNA Synthesis by Group II Intron and Rationally Engineered R2 Retrotransposon RTs in Human Cells

[0558] The ability of RTs to produce cDNA in a mammalian environment was tested by expressing them in mammalian cells and detecting cDNA synthesis by qPCR. Reverse transcriptases were cloned in a plasmid for mammalian expression under the CMV promoter as fusion proteins having MS2 coat protein (MCP) at the N terminus, in addition to a flag-HA tag (FH). A plasmid containing MCP-RT fusion candidate was cloned and isolated for transfection in HEK293T cells. mRNA encoding a cargo fused to nanoluciferase was made, the reaction was treated with DNase for 1.5 hours and the mRNA was cleaned up. The mRNA was hybridized to a complementary DNA primer and the mRNA/DNA hybrid was transfected into HEK293T cells 6 hours after the plasmid containing the MCP-RT fusion was transfected. After transfection, cells were lysed and 100 μl of the quick extract is added per well in a 24 well plate for cDNA synthesis evaluation. Primers amplify the first and last 100 bp products from the newly synthesized full-length cDNA (4100 bp in length).

[0559] cDNA synthesis activity in HEK293T cells was confirmed for many group II intron RTs (FIG. 85A). In addition, several engineered variants of non-LTR retrotransposon RTs MG140-74 and MG140-88 showed comparable cDNA synthesis activity and processivity to their WT counterparts (FIG. 85B). Results suggest that selected mutations do not alter the mechanistic properties of these RTs when tested in human cells.

### Example 34—Fidelity of cDNA Synthesis of Group II Intron RTs

### Substitution Error Rate Analysis

[0560] The fidelity of RTs was evaluated by NGS of cDNA products using either a standard or modified RNA template as described previously. The standard RNA was prepared using an in vitro transcription reaction containing an equimolar mixture of ATP, UTP, GTP, and CTP while the modified RNA template was prepared with 100% replacement of UTP with m1TP (N1-methyl-pseudouridine-5′-triphosphate). Improvements in the quality of the RNA template (SEQ ID NO: 55) were made to improve assay sensitivity and the RT substitution error rates were re-measured. Of note, the fidelity data presented are representative of two independent experiments, each of which were library prepped and sequenced in triplicate, and the data is reproducible. Control RT 1 is a retroviral RT MMLV, Control RT 2 is the GII intron RT TGIRT, and Control RT 3 is the GII intron RT MarathonRT. Analysis of substitution error rate (FIG. 59A) reveals that both positive control GII intron RTs TGIRT (Control 2) and MarathonRT (Control 3) have error rates similar to those that have been published previously which also used an UMI-based NGS method. MMLV (Control 1) has a higher error rate on the standard template compared to GII intron RTs, however is significantly more accurate on the modified (m1Ψ) RNA template. GII intron RTs (MG153-5, MG153-18, MG153-20, MG153-51; SEQ ID NOs: 70, 83, 85, and 113) have similarly low substitution error rates to that of Control 2 and Control 3 on both the standard (U) and modified (m1Ψ) RNA templates.

[0561] Analysis of the inverse of the substitution error rate indicates the theoretical length of substitution error-free cDNA that could be synthesized by the RT. Based on these results, MG153-5 has a similar cDNA synthesis accuracy to that of the positive control enzyme MarathonRT, generating a theoretical error-free cDNA molecule of ~8,000 nucleotides in length (FIG. 59B). MG153-5 outperforms the positive control enzyme TGIRT and the other tested GII intron RTs by this fidelity metric.

### Error Type by Position

[0562] Analysis of error type by position along the RNA template was calculated by dividing the count of error at the position (substitution, insertion, or deletion) by the total consensus cDNA sequences aligned at the position. The analysis reveals that for all tested RTs, substitution (referred to in the figure as a mismatch), as opposed to insertion or deletion, dominates the error profile on both standard and modified templates (FIGS. 60-61). All tested RTs have a propensity to misincorporate at certain positions along the RNA template. A notable substitution hotspot identified on the standard template located at position 78 corresponds to a nucleotide mid-way through a putative hairpin structure innate to the RNA template (FIG. 60, denoted by arrows).

### Substitution Preference

[0563] For every substitution error, the nucleotide misincorporated (observed) was compared to the reference nucleotide and tabulated. Counts are displayed as a confusion matrix (FIG. 62). Based on these results, all tested GII intron RTs (including Control 2 and Control 3) tend to misincorporate an A where a G should have been incorporated whereas retroviral RT MMLV (Control 1) has a tendency to misincorporate an A where a C should have been incorporated. Substitution preference is similar between the standard and modified RNA template for all tested RTs, indicating that misincorporation did not occur at a disproportionately higher frequency at modified m1Ψ sites on the RNA template.

[0564] The distinct substitution preference between the retroviral control and GII intron RTs can, in part, be explained by the substitution hotspot at position 78 (FIGS. 60-61). At position 78 on the RNA template, the RT should incorporate a C and MMLV (Control 1) exhibits the strongest C->A substitution hotspot at this position.

### Insertion and Deletion Analysis

[0565] The size and frequency of insertion/deletion (indel) errors was also tabulated. Insertion sizes are displayed as positive values on the X-axis, whereas deletions are displayed as negative values. Frequency is calculated as the count of the indel of the particular size divided by the total number of indel errors. The most prevalent indel error for GII intron RTs (including Control 2 and Control 3) are insertions of 1 nucleotide and, to a lesser extent, deletions of 1 nucleotide (FIGS. 63-64). In contrast, MMLV (Control 1) results in large insertions (53 nucleotides) and large deletions (50 and 110 nucleotides). Of note, indel profiles are similar for GII intron RTs on the standard and modified template.

cDNA Length Distribution: CDNA Drop-Off and Non-Templated Additions

[0566] Since the NGS library prep methodology for fidelity analysis relies on 3′ cDNA adapter ligation, cDNA products that are smaller or larger than the expected full-length cDNA product can also be analyzed. These include cDNA drop-off products resulting from the RT falling off the RNA template and RT incorporation of extra nucleotides at the 3′ end of the cDNA past the RNA template, also referred to as non-templated additions (NTA). Frequency of cDNA drop-off, correct length, and NTA was calculated as the frequency per consensus cDNA sequence. For all tested GII intron RTs (including Control 2 and Control 3), minimal cDNA drop-off products are observed (FIGS. 65-66). However, all GII intron RTs have appreciable NTA activity, with the dominant product being an incorporation of 1 extra nucleotide at the 3′ end of the cDNA. These results corroborate previous studies of Control 2 (TGIRT) and Control 3 (MarathonRT), which indicate these GII intron RTs are highly processive and, in the case of Control 2 (TGIRT), have prominent NTA activity where the incorporation of 1 non-templated nucleotide is kinetically preferred.

[0567] The less processive retroviral RT MMLV (Control 1) produces prominent drop-off cDNA products on the standard template (FIG. 65), with one drop-off hotspot corresponding at and nearby position 78, the same position as the substitution hotspot correlated to a predicted hairpin in the RNA template. In contrast, MMLV (Control 1) produces mostly full-length cDNA products on the modified template (FIG. 66), which likely explains the improved fidelity of MMLV on the modified RNA substrate. Like the GII intron RTs, MMLV (Control 1) also exhibits NTA activity under these reaction conditions as expected.

### Non-Templated Addition (NTA) Analysis

[0568] For the cDNA molecules that contain a non-templated addition, the type of nucleotide incorporated was also analyzed. The count of each NTA base identity is divided by the total number of NTA bases. The calculated frequencies are then multiplied to the frequency of cDNAs with NTAs relative to all other cDNAs. NTA analysis for MMLV (Control 1) corroborates previous findings that demonstrated that MMLV tends to incorporate 2-3 cytosines (FIGS. 67-68). Previous results have shown that NTA by TGIRT has a strong preference for incorporating purines, specifically an A (A>G>>C≈T). However, under these reaction conditions, the first NTA nucleotides observed are C, G, and A in almost equivalent abundance, with T being strongly disfavored. The discrepancy may be explained by the fact that the first NTA nucleotide identity was previously determined from a blunt-end duplex, whereas this data was obtained from a primer extension reaction. Additionally, it is unclear whether the identity of the 5′ terminal nucleotide on the RNA template can impact the preference of NTA nucleotide incorporation. Similar to TGIRT (Control 2), MarathonRT (Control 3) and the MG GII intron RTs (MG153 family), T is also strongly disfavored for NTA. MarathonRT (Control 3), MG153-5, and MG153-51 have a strong A preference for the first NTA nucleotide, whereas MG153-18 and MG153-20 have an NTA preference profile more similar to TGIRT (Control 2). Of note, the NTA base incorporation profile is similar for all RTs on the standard and modified RNA template.

### Example 35—Expression and Purification of a R2 Retrotransposon RT

### MTP Screening MG140-8c4 and MG140-8c5 Constructs

[0569] Expression of full-length WT MG140-3 and MG140-8 proteins was unsuccessful due to possible toxicity from the active endonuclease domain of these constructs. Two truncations were designed with the goal of removing the endonuclease domain and leaving the rest of the protein intact. These two truncations (MG140-8c4 and MG140-8c5, SEQ ID NOs: 1807-1808) were tested for expression and purifiability in a small screen which evaluated expression in two different expression vectors (pMGD, pMGE), two different growth media (2×YT, TB), and three different induction temperatures (24° C., 30° C., 37° C.). The final expression construct was 6×His-GS-SUMO-(GS)₂(SG)₂-PSP-nucleoplasmin bipartite NLS-MG140-8c5-SV40 NLS (Table 3). All expressions were performed in the Iq cell strain. Five mL cultures of each construct were grown overnight, shaking at 37° C., in 2×YT media. The following morning, cultures were diluted to 0.1 OD₆₀₀ in 50 mL pre-warmed 2×YT or TB with 100 μg/mL Carbenicillin and grown, shaking at 37° C. Cultures were induced at OD₆₀₀=0.6-0.8 with 0.5 mM IPTG. Following induction, cultures were incubated at 24° C., 30° C., or 37° C. for 4 hrs before harvesting via centrifugation (2,272×g, 10 min) in a 24 deep-well plate. The supernatant was decanted, and all pellets were resuspended in 500 μL resuspension buffer (50 mM HEPES pH 7.5, 1000 mM NaCl, 10 mM MgCl₂, 0.5 mM EDTA, 25 mM imidazole, 10% glycerol)+protease inhibitors+2 mg/mL lysozyme. Resuspended pellets were placed at −80° C. for storage until ready for use. Upon thawing, each well was supplemented with 4.5 mL resuspension buffer and sonicated to lyse (2 s on, 8 s off, 65% amplitude, 2 min total process time). Lysed samples were then clarified via centrifugation (5,000×g, 20 min), and 4.8 mL supernatant was transferred to a new 24 deep well plate. HisPur magnetic Ni-NTA resin was washed twice with Eq buffer (50 mM HEPES pH 7.5, 1000 mM NaCl, 10 mM MgCl₂, 30 mM imidazole, 0.1% Tween-20), and added to each individual sample well (approximately 950 μg resin per well in a volume of 200 μL). A KingFisher Flex was used to conduct purification in a 24 well format. Samples were allowed to bind resin with gentle mixing, and were then washed twice in 3 mL wash buffer (50 mM HEPES pH 7.5, 1000 mM NaCl, 10 mM MgCl₂, 0.5 mM EDTA, 50 mM imidazole, 0.1% Tween-20) and eluted in elution buffer (50 mM HEPES pH 7.5, 1000 mM NaCl, 10 mM MgCl₂, 0.5 mM EDTA, 500 mM imidazole, 5% glycerol, 0.5 mM TCEP). Samples of eluates were mixed with equal volume 2× Laemmli Sample Buffer+10% 2-mercaptoethanol and run on a gel for analysis (FIG. 69). The gels were evaluated by presence or absence of a protein band near the expected molecular weight of each protein construct. Expression of MG140-8c4 in either the pMGD or pMGE vector failed to produce a significant band at the expected molecular weight (132 kDa in pMGD, 102 kDa in pMGE). Expression of MG140-8c5 produced a similar failed result when expressed in the pMGD vector (expected molecular weight of 145 kDa), while expression of this construct in the pMGE vector produced a band of the expected molecular weight (115.6 kDa). Yield was evaluated by assessing protein-of-interest band intensity relative to contaminants. Overall yields of proteins expressed in 2×YT and TB media are comparable, and expressions in both types of media show slightly higher yield at lower temperatures (24° C. and 30° C.) compared to 37° C.

TABLE 3

| Element | Element Sequence (AA) | Description |
|---|---|---|
| 6xHis | Affinity purification | HHHHHH |
| | tag | (SEQ ID |
| | | NO: 2271) |
| GS | GS | linker |
| SUMO | TCGGACTCAGAAGTCAATCAA | Small |
| | GAAGCTAAGCCAGAGGTCAAG | ubiquitin- |
| | CCAGAAGTCAAGCCTGAGACT | like |
| | CACATCAATTTAAAGGTGTCC | modifier |
| | GATGGATCTTCAGAGATCTTC | fusion |
| | TTCAAGATCAAAAAGACCACT | protein |
| | GCCTTTAAGAAGGCTATGGAA | to aid |
| | GCGTTCGCTAAAAGACAGGGT | expression |
| | AAGGAAATGGACTCCTTAAGA | and |
| | TTCTTGTACGACGGTATTAGA | solubility |
| | ATTCAAGCTGATCAGACCCCT | |
| | GAAGATTTGGACATGGAGGAT | |
| | AACGATATTATTGAGGCTCAC | |
| | AGAGAACAGATTGGTGGA | |
| | (SEQ ID NO: 2272) | |
| (SG)₂(GS)₂ | SGSGGSGS | linker |
| | (SEQ ID NO: 2273) | |
| PSP | LEVLFQGP | PreScission |
| | (SEQ ID NO: 2274) | Protease |
| | | cut site |
| | | motif |
| Nucleoplasmin | KRPAATKKAGQAKKKK | Nuclear |
| bipartite NLS | (SEQ ID NO: 1478) | localization |
| | | sequence |
| SV40 NLS | PKKKRKV | Nuclear |
| | (SEQ ID NO: 1477) | localization |
| | | sequence |

### Scaled-Up Expression/Purification of MG140-8c5

[0570] An expression screen of MG140-8c5 revealed the best expression conditions to be at lower temperatures (24° C. and 30° C.), but an overnight expression of MG140-8c5 at 16° C. had yet to be tested. The final expression construct was 6×His-GS-SUMO-(GS) 2 (SG) 2-PSP-nucleoplasmin bipartite NLS-MG140-8c5-SV40 NLS (Table 1, SEQ ID NOs: 1807-1808). All expressions were performed in the Iq cell strain. A 50 mL culture of MG140-8c5 in the pMGE expression vector was grown overnight, shaking at 37° C., in 2×YT media. The following morning, 10 mL of the overnight culture were used to inoculate two 1 L cultures of TB with 100 μg/mL Carbenicillin, which were grown, shaking at 37° C. Prior to induction, cultures were cooled to 20-25° C. in an ice-water bath. Cultures were induced at OD₆₀₀=0.6-0.8 with 0.5 mM IPTG; following, one 1 L culture was incubated overnight at 16° C., shaking, while the other 1 L culture was incubated at 23.5° C., shaking, for 5 hrs. At the end of the induction period, cultures were harvested by centrifugation (6,000×g, 4° C., 10 min) and the pellets were resuspended in resuspension buffer (50 mM HEPES pH 7.5, 1000 mM NaCl, 10 mM MgCl₂, 0.5 mM EDTA, 25 mM imidazole, 10% glycerol)+protease inhibitors+2 mg/mL lysozyme and stored at −80° C. until purified. Upon thawing, resuspended cells were sonicated with a one-half inch sonicator tip at 75% amplitude, 5 s on, 15 s off, for a total process time of 2-3 min in the presence of 0.5% β-octylglucoside detergent. Cell lysates were then clarified via centrifugation (25,000×g, 4° C., 30 min). The supernatants were filtered through a 0.2 μm PES membrane filter and passed over a 5 mL HisTrap using an AKTA Pure FPLC. After sample application, the HisTrap was washed with 6 CV wash buffer A1 (50 mM HEPES pH 7.5, 1000 mM NaCl, 10 mM MgCl₂, 0.5 mM EDTA, 25 mM imidazole, 0.01% Tween-20, 5% glycerol) and 2 CV wash buffer A2 (50 mM HEPES pH 7.5, 1000 mM NaCl, 10 mM MgCl₂, 0.5 mM EDTA, 25 mM imidazole, 5% glycerol) before elution with a 10 CV gradient into elution buffer (50 mM HEPES pH 7.5, 1000 mM NaCl, 10 mM MgCl₂, 0.5 mM EDTA, 500 mM imidazole, 5% glycerol) and collected in 0.5 mL fractions (FIGS. 70A and 70C). Samples of select fractions were mixed with equal volume 2× Laemmli Sample Buffer+10% 2-mercaptoethanol and run on a gel for analysis (FIGS. 70B and 70D). In contrast to the analysis gels from the expression screening performed on the KingFisher Flex, these purifications were very impure with a lot of contaminants. Interestingly, a band at the expected molecular weight eluted off the HisTrap later (at a higher imidazole concentration) than most contaminants, and these fractions (175-179 mL) were able to be separately combined and concentrated. A comparison of the MG140-8c5 constructs expressed at 16° C. overnight versus expression at 23.5° C. for 5 hrs shows little difference in the elution profile off the HisTrap; however, protein purified from the 23.5° C. expression had considerably more nucleic acid contamination, as determined by the absorbance at 260 nm (A260) monitored during elution off the HisTrap (FIGS. 70A and 70C).

### Example 36—cDNA Synthesis Activity of R2 Retrotransposon RT on Standard and Modified RNA Templates

[0571] The in vitro activity of the purified R2 retrotransposon RT MG140-8c5 (SEQ ID NOS: 1807-1808) on a standard and modified RNA sequence (SEQ ID NO: 55) was assessed by a primer extension reaction. Two control RTs, MMLV (Control 1) and AccupScript (Control 4) were tested as control enzymes. The standard RNA was prepared using an in vitro transcription reaction containing an equimolar mixture of ATP, UTP, GTP, and CTP while the modified RNA template was prepared with 100% replacement of UTP with m1ΨTP (N1-methyl-pseudouridine-5′-triphosphate). The substrate for the reaction was 100 nM of either standard or modified RNA template (202 nt) annealed to a 5′-FAM labeled primer (SEQ ID NO: 56), and the enzyme was used at a final concentration of 100 nM. The reaction buffer contained the following components: 40 mM Tris-HCl (pH 7.5), 0.2 M NaCl, 10 mM MgCl₂, 1 mM TCEP, RNase inhibitor (murine), and 0.5 mM dNTPs. Following incubation at 37° C. for 1 h, the reaction was quenched via incubation with RNaseH, followed by the addition of 2×RNA loading dye. The resulting cDNA product(s) were separated on a 10% denaturing polyacrylamide gel and were visualized. Based on these results (FIG. 71), purified MG140-8c5 is active and retains appreciable cDNA synthesis activity on the modified RNA template. Of note, data is the result of two independent experimenters and the data is reproducible.

### Example 37—cDNA Synthesis Strand Displacement Activity of R2 Retrotransposon RT

[0572] Some reverse transcriptases possess strand displacement activity and are able to displace segments of nucleic acids annealed to the single-stranded RNA template on which they are synthesizing cDNA. To test this, a fluorescence anisotropy-based assay was developed to detect strand displacement. In this assay, a ssDNA priming oligo (SEQ ID NO: 1809) is annealed to the 3′ end of the template RNA (SEQ ID NO: 55) strand and a ssDNA displacement oligo with a 5′ FAM (SEQ ID NO: 1810) is annealed to the 5′ end of the same template RNA (FIG. 72A). Priming oligo is annealed in a 1:1 molar ratio with the template RNA, while the displacement oligo is annealed at a slightly sub-stoichiometric ratio of 0.9:1 with the template RNA. In the annealed state, the molecule—and therefore the fluorophore—tumble slowly in solution and therefore fluorescence polarization remains high. In the event of strand displacement, however, the displaced oligo-conjugated FAM molecule will tumble faster and will therefore depolarize light to a higher degree, which is measured as a decrease in polarization, which is then used to calculate anisotropy. Reactions consisted of 100 nM RNA template annealed to priming and displacement oligos, 1000 nM purified MG140-8c5 protein, 1×RT buffer (40 mM Tris-HCl (pH 7.5), 0.2 M NaCl, 10 mM MgCl₂, 1 mM TCEP), and 1 U/μL RNase inhibitor, murine. Experimental samples were then initiated with the addition of Cf=0.5 mM dNTPs in 1×RT buffer, while negative controls instead received an equal volume of 1×RT buffer. FAM polarization was then monitored using a plate reader. The data show a rapid depolarization of FAM in the presence of dNTPs but not in the absence of dNTPs, suggesting that the FAM-labeled oligo has been displaced by MG140-8c5 cDNA synthesis activity (FIG. 72B).

### Example 38—Second-Strand Synthesis Strand Displacement Activity of R2 Retrotransposon RT

[0573] Having already developed an assay to detect strand displacement during cDNA synthesis, an assay was developed to detect strand displacement during second-strand synthesis, where a reverse transcriptase polymerizes complementary DNA on a ssDNA template. To test end, a fluorescence-based assay was developed to detect strand displacement. In this assay, a 100-nt ssDNA oligo (SEQ ID NO: 1811) is synthesized with a 5′ FAM. A ssDNA priming oligo (SEQ ID NO: 1812) is annealed to the 3′ end of the template DNA strand and a ssDNA displacement oligo with a 3′ quencher moiety (SEQ ID NO: 1813) is annealed to the 5′ end of the same template DNA (FIG. 73A). Priming oligo is annealed in a 1:1 molar ratio with the template RNA, while the displacement oligo is annealed at a slightly super-stoichiometric ratio of 1.05:1 with the template DNA. In the annealed state, the quenching moiety is in close proximity to the template FAM, and the FAM fluorescence is quenched. In the event of strand displacement, however, the quencher-conjugated molecule will no longer be close enough to FAM to quench fluorescence, and an increase in fluorescence is observed (FIG. 73A). Reactions consisted of 25 nM DNA template annealed to priming and displacement oligos, 1000 nM purified MG140-8c5 protein, and 1×RT buffer (40 mM Tris-HCl (pH 7.5), 0.2 M NaCl, 10 mM MgCl₂, 1 mM TCEP). Baseline measurements were taken before experimental samples were initiated with the addition of Cf=0.5 mM dNTPs in 1×RT buffer at the 48 s mark, while negative controls instead received an equal volume of 1×RT buffer. FAM fluorescence was then monitored using a plate reader. The data show an increase in FAM fluorescence in the presence of dNTPs but not in the absence of dNTPs, suggesting that the quenching oligo has been displaced by MG140-8c5 second-strand synthesis activity (FIG. 73B).

### Example 39—Second Strand Synthesis Activity and Strand Displacement Activity of GII Intron RTs

[0574] Having demonstrated the feasibility of detecting strand displacement activity during second-strand synthesis using fluorescence-unquenching on a 100-nt template, the use of this assay design was expanded to assess second-strand synthesis processivity by using a 1004-nt FAM-labeled ssDNA template. This 1004-nt FAM-labeled template was developed by first PCR-amplifying a 1004-bp sequence using a primer pair where one primer was synthesized with a 5′ phosphate (SEQ ID NO: 1814), and the other primer was synthesized with a 5′ FAM label (SEQ ID NO: 1815). The PCR products were purified using a 1.5×volume excess of SPRI beads following manufacturer-recommended protocols, and the eluate was concentrated using a 100 k MWCO concentrator. The resulting dsDNA was used as substrate in a reaction with Lambda Exonuclease to produce ssDNA with a 5′ FAM label (FIG. 74A; SEQ ID NO: 1816).

[0575] GII intron RT enzymes TGIRT (Control 2), MarathonRT, (Control 3), MG153-5 (SEQ ID NO: 70), and MG153-51 (SEQ ID NO: 113), were generated by a cell-free expression system. Expression constructs were codon-optimized for E. coli and contain an N-terminal single Strep tag. To evaluate if these RTs are capable of performing second strand synthesis and strand displacement on a 1004-nt ssDNA template, expression reactions were diluted to a final 10% v/v in a reaction containing 40 mM Tris-HCl (pH 7.5), 0.2 M NaCl, 10 mM MgCl₂, 1 mM TCEP, 0.5 mM dNTPs, and 33 nM substrate. The substrate for the reaction was prepared by annealing the 5′ FAM-labeled ssDNA template in a 1:1 molar ratio to a DNA priming oligo and 0.95:1 (oligo: template) molar ratio of displacement oligo labeled with a 3′ quencher (SEQ ID NO: 1813). Reactions were initiated by the addition of dNTPs to a final concentration of 0.5 mM dNTPs and FAM fluorescence was monitored over time using a plate. The data show a rapid increase in fluorescence after the addition of dNTPs for Control 2, MG153-5, and MG153-51, consistent with strand displacement via second-strand synthesis (FIG. 74B). Control_1 demonstrates a short lag phase before a similar increase in FAM fluorescence. Contrastingly, reactions that lacked a DNA expression template for a reverse transcriptase (NTC) showed only gradual and modest increase in FAM fluorescence over the course of the reaction. These data show that strand displacement, and therefore second-strand synthesis activity, is measurable from reaction products, without the need to purify heterologously-expressed proteins.

### Example 40—Template Switching Activity of GII Intron and R2 Retrotransposon RTs

[0576] GII intron and R2 retrotransposon RTs possess the ability to perform template switching from the 5′ end of one RNA template (herein referred to as “Donor”) to the 3′ end of another RNA template (herein referred to as “Acceptor”) (FIG. 75). This is facilitated by the RT's NTA activity whereby the RT adds extra nucleotides to the 3′ end of the cDNA molecule in a non-templated manner, creating a small overlap sequence with the Acceptor RNA. To quantify the template switching activity of RTs, a multiplexed Taqman qPCR assay was developed (FIG. 75). The FAM Taqman probe (SEQ ID NO: 1605) and primer set (SEQ ID NOs: 35-36) were designed to detect cDNA resulting from initiation from the priming oligo. The HEX Taqman probe/5HEX/CACTAGTTC/ZEN/TAGAGCGGCCG/3IABKFQ/with TAGAGCGGCCG corresponding to SEQ ID NO: 1817 and primer set (SEQ ID NOs: 1818-1819) were designed to detect cDNA resulting from a template switch, with the primers designed to amplify the junction between Acceptor and Donor cDNA. Taqman primers and probes were validated using a standard curve prepared using a serial dilution of DNA template with known concentrations.

[0577] TGIRT (Control 1), MMLV (Control 2), MarathonRT (Control 3), and MG153 family of GII intron enzymes were derived from a cell-free expression system. Expression constructs were codon-optimized for E. coli and contain an N-terminal single Strep tag, except for MG153-18 (SEQ ID NOs: 1820-1821) and MG153-18_G161K (SEQ ID NOs: 1822-1823) in FIG. 77 which were expressed as an N-terminal fusion of 6×His-GS-SUMO-(GS)₂ (SG)₂-PSP (Table 1). R2 retrotransposon RT MG140-8c5 was tested as a purified protein as described above (SEQ ID NOs: 1807-1808).

[0578] Template switching reactions were prepared by combining each RT with primed Donor RNA template (SEQ ID NO: 1824, IDT) and Acceptor RNA template (SEQ ID NO: 1825 or 1826, IDT). Each RT was also tested against a primed control RNA template, referred to as “Full template” where the Acceptor and Donor RNA sequences are concatenated (SEQ ID NO: 1827). RTs produced by a cell-free expression system were used at a final 10% v/v in the reaction, while MG140-8c5 was used at a final concentration of 200 nM. The primed Donor RNA template and primed Full template were prepared by annealing each template to a ssDNA priming oligo in a 1:1 molar ratio. The template switching reactions contained 100 nM of primed Donor and 100 nM (1×), 500 nM (5×), or 1 μM (10×) of unprimed Acceptor RNA template. The control template was tested at a final concentration of 100 nM. Unless otherwise specified, the reaction buffer used for the reactions was 50 mM Tris-HCl (pH 8.0), 75 mM KCl, 3 mM MgCl₂, 1 mM TCEP, RNase inhibitor, and 0.5 mM dNTPs. Following incubation at 37° C. for 1 h, the reaction was quenched via heat inactivation at 95° C. for 2 minutes. The cDNA products were detected by the Taqman FAM and HEX primers and probes as described above and quantified by extrapolating against a standard curve. Efficiency of template switching was calculated by dividing the quantity of cDNA resulting from a template switch (HEX signal) by the quantity of cDNA resulting from initiation (FAM signal). Results demonstrate that both the GII intron MG153 family of RTs (FIGS. 76A-77B) and the R2 retrotransposon RT MG140-8c5 (FIG. 78) possess template switching activity, albeit to varying degrees.

[0579] To test how the identity of the 3′ terminal nucleotides on the Acceptor RNA impact the template switching efficiency of GII intron RTs, an Acceptor RNA with 3′UU nucleotides was compared to a mixed Acceptor substrate prepared by combining 4 templates in equimolar ratio whose 3′ terminal nucleotides are UU, AA, GG, and CC. Template switching efficiency is reduced, albeit still detectable, for all RTs when using an Acceptor template with mixed 3′ ends (denoted as NN, FIG. 77) compared to the 3′UU Acceptor (FIG. 76). For example, TGIRT (Control 1) template switching drops from 0.76% to 0.012% with the mixed Acceptor. This result is likely explained by the fact that GII intron RTs prefer to incorporate A nucleotides during NTA activity, which would facilitate template switching preferentially to acceptors that contain terminal U nucleotides. Interestingly, even with the lowered template switching activity with mixed acceptor, the overall efficiency trends remain relatively the same when comparing between RTs, with MG153-18 and its accompanying variant having the highest efficiency (FIGS. 76-77) across datasets.

[0580] To evaluate how different ratios of Acceptor to Donor RNA may impact template switching efficiency of the R2 retrotransposon RT MG140-8c5, Acceptor RNA was added in 10×, 5×, or 1× molar ratio to the Donor RNA (FIG. 76). The template switching efficiency is correlated to the quantity of Acceptor RNA added to the reaction, with a highest determined efficiency of ~37% when Acceptor is present in 10× molar excess to Donor. Slight changes in the reaction buffer composition do not appear to impact template switching.

[0581] In order to evaluate some of the biochemical properties of rationally engineered RTs vs. their WT variants, the in vitro template switching activities for rationally engineered group II intron and non-LTR R2 retrotransposon RTs was determined. A multiplexed Taqman qPCR assay was developed, in which the FAM Taqman probe and primer set were designed to detect cDNA resulting from initiation from the priming oligo, whereas the HEX Taqman probe and second primer set were designed to detect cDNA resulting from a template switch (FIG. 86A). Taqman primers and probes were validated using a standard curve prepared using a serial dilution of DNA template with known concentrations. RT variants tested were either purified or expressed in cell-free expression systems.

[0582] Template switching reactions were prepared by combining each RT preparation (purified or cell-free extract) with primed Donor RNA template and Acceptor RNA template. Each RT was also tested against a primed control RNA template, referred to as “Full template” where the Acceptor and Donor RNA sequences are concatenated. RTs produced by a cell-free expression system were used at a final 10% v/v in the reaction, while purified RTs were used at a final concentration of 200 nM. The primed Donor RNA template and primed “Full template” were prepared by annealing each template to a ssDNA priming oligo in a 1:1 molar ratio. The template switching reactions contained 100 nM of primed Donor and 100 nM (1×), 500 nM (5×), or 1 μM (10×) of unprimed Acceptor RNA template. The control template was tested at a final concentration of 100 nM. Unless otherwise specified, the reaction buffer used for the reactions was 50 mM Tris-HCl (pH 8.0), 75 mM KCl, 3 mM MgCl₂, 1 mM TCEP, RNase inhibitor, and 0.5 mM dNTPs. Following incubation at 37° C. for 1 h, the reaction was quenched via heat inactivation at 95° C. for 2 minutes. The cDNA products were detected by the Taqman FAM and HEX primers and probes as described above and quantified by extrapolating against a standard curve. Efficiency of template switching was calculated by dividing the quantity of cDNA resulting from a template switch (HEX signal) by the quantity of cDNA resulting from initiation (FAM signal). Results indicate that purified group II intron RTs, MG153-18 and MG153-51 exhibit much lower levels of template switching activity than the purified non-LTR retrotransposon RT MG140-8 with the endonuclease domain deletion (140-8c5) or with a dead endonuclease domain (FIG. 86B). Mutations on group II intron RTs MG153-18 and MG153-51, and on non-LTR retrotransposon RTs MG140-3 and MG140-8 with a dead endonuclease domain further reduce the levels of template switching activity in vitro (FIG. 86B and FIG. 86C). Results indicate that rational engineering of RT reduces unwanted activities such as template switching.

### Example 41—Unprimed Activity of GII Intron and R2 Retrotransposon RTs

Evaluating Unprimed cDNA Synthesis Activity by qPCR

[0583] To evaluate the impact of 3′ RNA template structure/sequence on the ability of RTs to perform unprimed cDNA synthesis activity, RNA templates were designed to contain either a 3′ polyA (SEQ ID NO: 1828) or 3′ hairpin (MS2 loop) (SEQ ID NO: 1829). To evaluate whether the 3′OH of the RNA template could be used to initiate cDNA synthesis, each template was also tested with the 3′OH masked by a blocking group (C3 spacer, /3SpC3/) (SEQ ID NOs: 1830-1831). GII intron and R2 RTs were tested for their ability to perform cDNA synthesis using a 100 nM RNA template that was either annealed or not annealed to a priming DNA oligo (SEQ ID NO: 34 or 35). For these reactions, the RT enzymes MMLV (Control 1), TGIRT (Control 2), MG153-5 (SEQ ID NO: 70), MG153-18 (SEQ ID NOs: 1820-1821), MG153-18_G161K (SEQ ID NOs: 1822-1823), MG153-20 (SEQ ID NO: 85) and MG153-51 (SEQ ID NO: 113) were derived from a cell-free expression system and used 10% final v/v % in the cDNA synthesis reaction. Expression constructs were codon-optimized for E. coli and contain an N-terminal single Strep tag, except for MG153-18 and MG153-18_G161K which were expressed as an N-terminal 6×His-GS-SUMO-(GS)₂ (SG)₂-PSP (Table 1) fusion. Expression for all PURExpress-derived RTs were confirmed by SDS-PAGE analysis. MG140-8c5 trim (SEQ ID NOs: 1807-1808) was used as purified protein as described above at a final concentration of 200 nM. For MMLV (Control 1), TGIRT (Control 2), and the MG153 family, the reaction buffer contained the following components: 50 mM Tris-HCl (pH 8.0), 75 mM KCl, 3 mM MgCl₂, 1 mM TCEP, RNase inhibitor and 0.5 mM dNTPs. For 140-8c5 trim, the reaction buffer contained the following: 40 mM Tris-HCl (pH 7.5), 0.2 M NaCl, 10 mM MgCl₂, 1 mM TCEP, RNase inhibitor, and 0.5 mM dNTPs. Following incubation at 37° C. for 1 h, cDNA products were detected by Taqman qPCR using a taqman probe (FAM) (SEQ ID NO: 1605) and primers (SEQ ID NOs: 35-36) specific to the expected cDNA product.

[0584] Based on these results, all tested RTs have some extent of unprimed cDNA synthesis activity, with detectable cDNA product levels at least 10-fold above the PURExpress NTC (no expression template control) background (FIG. 79, dashed line). However, all RTs do preferentially perform cDNA synthesis on primed RNA templates, albeit to different extents. To compare RT preference for primed vs. unprimed templates, the quantity (nM) of cDNA produced from a primed RNA template was divided by the quantity unprimed. Strikingly, MMLV (Control 1) has the strongest preference for primed RNA templates (~480-2,570-fold, FIG. 80). GII intron RTs (Control 2 and MG153 family) have more unprimed cDNA synthesis if the 3′ end of the RNA template is structured via an MS2 loop. Some, but not all, of the unprimed cDNA synthesis activity appears to be facilitated by the 3′OH, as some cDNA synthesis is still observed when the 3′OH is masked. In contrast, the R2 retrotransposon RT MG140-8c5 has prevalent unprimed activity when the 3′ end of the RNA template is both structured or unstructured. Unprimed cDNA synthesis, in this case, does not seem to be facilitated by the 3′OH since significant activity remains if the 3′OH is blocked. When the preference for primed substrates across all templates was averaged, the results indicate MMLV (retroviral Control) has the strongest preference for primed (~1,800-fold preference), while the R2 retrotransposon MG140-8c5 has the weakest (~9-fold preference) (FIG. 81).

[0585] Evaluating unprimed cDNA synthesis and S3 activity by quencher displacement assay Up to this point, negative controls in strand-displacement assays were performed by omitting dNTPs, without which reverse transcriptases cannot polymerize either cDNA or second-strand synthesis. To test whether the cDNA and second-strand synthesis in these reactions are initiating at the desired priming site, control experiments comparing displacement of quenching oligos from both primed and unprimed template strands were conducted. RNA templates (SEQ ID NO: 1832) or ssDNA templates (SEQ ID NO: 1811), both 100 nt long, were ordered from IDT with 5′ FAM modifications. Primed templates were annealed to both an equimolar ratio priming oligo (SEQ ID NO: 1812) and a slight excess (1.05:1) of quenching displacement oligo (SEQ ID NO: 1813); unprimed templates were annealed only to the quenching displacement oligo (also at a 1.05× molar excess over template). Reactions were set up with 25 nM primed or unprimed template, 1000 nM MG140-8c5 enzyme, 1× buffer (40 mM Tris-HCl (pH 7.5), 0.2 M NaCl, 10 mM MgCl₂, 1 mM TCEP), and 1 U/μL RNase inhibitor, murine. Baseline measurements were taken before experimental samples were initiated with the addition of Cf=0.5 mM dNTPs in 1×RT buffer at the 48 s mark, while negative controls instead received an equal volume of 1×RT buffer. FAM fluorescence was then monitored using a plate reader. The data show an increase in fluorescence in all reactions where dNTPs were added, regardless of whether the template was primed or unprimed. This is true for reactions set up to detect strand displacement from both cDNA synthesis (FIG. 82A) and second-strand synthesis (FIG. 82B). Collectively, these data suggest that MG140-8c5 has significant activity on unprimed templates and that it is likely to perform both cDNA synthesis and second-strand synthesis on single-stranded nucleic acid templates.

### Example 42—Diversification of Reverse Transcriptases Generates Active Retron-Like and R2 Retrotransposon RTs

### Computational Reconstruction of RT Ancestral Intermediate Sequences

[0586] In an effort to generate further diversity and improve the biochemical properties of R2 retrotransposons and retron-like RT families, ancestral sequence reconstruction (ASR) algorithms were used. ASR is a computational technique that uses existing protein sequences and the relationships inferred between them to reconstruct putative sequences of ancient, now extinct, proteins. This technique was used to computationally reconstruct sequences of the MG160 and MG140 RT families. For the analysis, 367 MG160 protein sequences, 351 MG140 protein sequences, as well as subsets of MG140 protein sequences were separately aligned. Phylogenetic trees were built (FIG. 83) and the trees were rooted using distant RT sequences as outgroups. Ancestral sequence reconstruction was done. Insertions and deletions were identified manually for each reconstructed node. Reconstructed RT sequences (SEQ ID NOs: 1894-1926 and 2011-2026) are evaluated for cDNA synthesis activity in vitro and in human cell lines.

### Example 43—Integrations of Large Cargo Templates by Non-LTR Retrotransposon RTs and GII Intron RTs (Prophetic)

[0587] Group II introns and non-LTR retrotransposases are capable of integrating large cargo into a target site via target primed reverse transcription of an RNA template. To determine the most efficient cargo designs for integration by each RT, diverse RNA templates containing various combinations of 5′ and 3′ UTRs (SEQ ID NOs: 2211-2257) are designed. The ability of RTs to reverse transcribe and integrate cDNA from an RNA cargo into a target site is tested by expressing RTs in the presence of the RNA cargo.

[0588] Reverse transcriptases are cloned under a CMV or alternative promoter, and a Flag-HA-SV40 NLS tag is added at the N-terminus and another SV40-NLS is added at the C-terminus to ensure localization to the nucleus upon expression. Optionally, an MS2 coat protein (MCP) tag is fused to the RT to facilitate recognition of alternative MS2 tagged RNA template cargoes. Different RNA templates are designed for testing each RT for integration. For example, some templates can contain MS2 loops for recognition by the MCP-tagged RT, some template designs contain endogenous UTR elements, while some cargo designs contain additional homology arms flanking the desired cargo. Cargo for integration by each RT can encompass an antisense-mCherry open reading frame (ORF) driven by an EF1 alpha promoter, other reporter cargos, or any other desired cargo. The DNA sequence corresponding to each template with an additional T7 promoter is generated and PCR amplified by phusion polymerase according to the manufacturer's instructions. The PCR reaction is cleaned and 200-500 ng of cleaned PCR product is used for in vitro transcription reaction (IVT). The IVT reaction buffer contains 1×T7 buffer (40 mM Tris HCl, pH 7.5, 16.5 mM MgCl₂, 50 mM NaCl, 2.5 mM Spermidine and 1 mM DTT), 5 mM rATP, 5 mM rUTP, 5 mM rGTP, 4 mM CleanCap-AG, 0.1 unit IPPase (inorganic pyrophosphatase), 40 units RNase inhibitor and 750 units high concentration Hi-T7 RNA polymerase. The IVT reaction is incubated at 50° C. for 1 hr, followed by DNase I treatment with 10 units of DNaseI for 10 minutes at 37° C. The reactions are then cleaned using the MEGAclear transcription clean up kit following the manufacturer's instructions. The purity of RNA templates is confirmed by Tapestation and their quantities determined.

[0589] Integration assays are set up in a 6-well format with 1 million engineered cells plated per 6-well in 2 ml media. Each well is transfected with 2500 ng plasmid encoding the RT protein and 2400 ng of RNA cargoes. 24 hours later cells are split into puromycin containing media (2 ug/ml) to select for cells transfected with the RT plasmid, which contains a puromycin resistance cassette. Cells are switched to media without puromycin 3 days post-transfection and split every 2-3 days until 10 days post-transfection. Cells are collected at 4-10 days post transfection and lysed in 100 μL DNA Extraction Solution. Integration of cargo is detected by nested PCR at the left end junction (LE) and the right end junction (RE) using primers designed to anneal to the target and donor regions. PCR products are run on a tapestation and LE and RE PCR products are sequenced. Sequencing reads are analyzed to determine successful integration of cargo at the target site.

### REFERENCES

[0590] Price M N, Dehal P S, Arkin A P. FastTree 2—approximately maximum-likelihood trees for large alignments. Plos One 2010, 5, e9490.
[0591] Yamada K D, Tomii K, Katoh K. Application of the MAFFT sequence alignment program to large data—reexamination of the usefulness of chained guide trees. Bioinformatics 2016, 32, 3246-3251.
[0592] Jumper J, Evans R, Pritzel A, Green T, Figurnov M, Ronneberger O, et al. Highly accurate protein structure prediction with AlphaFold. Nature 2021, 596, 583-589.
[0593] Varadi M, Anyango S, Deshpande M, Nair S, Natassia C, Yordanova G, et al. AlphaFold Protein Structure Database: massively expanding the structural coverage of protein-sequence space with high-accuracy models. Nucleic Acids Res 2022, 50, D439-D444.
[0594] Wang Y, Guan Z, Wang C, Nie Y, Chen Y, Qian Z, Cui Y, Xu H, Wang Q, Zhao F, Zhang D, Tao P, Sun M, Yin P, Jin S, Wu S, Zou T. Cryo-EM structures of Escherichia coli Ec86 retron complexes reveal architecture and defense mechanism. Nat Microbiol. 2022, 7 (9), 1480-1489.
[0595] Mestre M R, González-Delgado A, Gutiérrez-Rus L I, Martínez-Abarca F, Toro N. Systematic prediction of genes functionally associated with bacterial retrons and classification of the encoded tripartite systems. Nucleic Acids Res. 2020, 48 (22), 12632-12647.
[0596] Kapitonov V V, Tempel S, Jurka J. Simple and fast classification of non-LTR retrotransposons based on phylogeny of their RT domain protein sequences. Gene 2009, 448 (2), 207-13.
[0597] Shimamoto, T., Shimada, M., Inouye, M. and Inouye, S. (1995) The role of ribonuclease H in multicopy single-stranded DNA synthesis in retron-Ec73 and retron-Ec107 of Escherichia coli. J. Bacteriol., 177, 264-267.
[0598] Simon A J, Ellington A D, Finkelstein I J. Retrons and their applications in genome engineering. Nucleic Acids Res 2019; 47:11007-11019. DOI: 10.1093/nar/gkz865.
[0599] Shimamoto, T., Hsu, M. Y., Inouye, S. and Inouye, M. (1993) Reverse transcriptases from bacterial retrons require specific secondary structures at the 5′-end of the template for the cdna priming reaction. J. Biol. Chem., 268, 2684-2692.
[0600] Zhao C, Liu F, Pyle A M. An ultraprocessive, accurate reverse transcriptase encoded by a metazoan group II intron. RNA. 2018 February; 24 (2): 183-195. doi: 10.1261/rna.063479.117. Epub 2017 Nov. 6. PMID: 29109157; PMCID: PMC5769746.
[0601] Lopez S C, Crawford K D, Lear S K, Bhattarai-Kline S, Shipman S L. Precide genome editing across kingdoms of life using retron-derived DNA. Nat Chem Biol. 2022 February; 18 (2): 199-206.
[0602] Lentzsch A M, Yao J, Russell R, Lambowitz A M. Template-switching mechanism of a group II intron-encoded reverse transcriptase and its implications for biological function and RNA-Seq. J Biol Chem. 2019 Dec. 20; 294 (51): 19764-19784. doi: 10.1074/jbc.RA119.011337. Epub 2019 Nov. 11. PMID: 31712313; PMCID: PMC6926447.
[0603] Wellenreuther R, Schupp I, Poustka A, Wiemann S; German cDNA Consortium. SMART amplification combined with cDNA size fractionation in order to obtain large full-length clones. BMC Genomics. 2004 Jun. 15; 5 (1): 36. doi: 10.1186/1471-2164-5-36. PMID: 15198809; PMCID: PMC436056.
[0604] Park S K, Mohr G, Yao J, Russell R, Lambowitz A M. Group II intron-like reverse transcriptases function in double-strand break repair. Cell. 2022 Sep. 29; 185 (20): 3671-3688.e23. doi: 10.1016/j.cell.2022.08.014. Epub 2022 Sep. 15. PMID: 36113466; PMCID: PMC9530004.
[0605] Harms, M. & Thornton J. W. Analyzing protein structure and function using ancestral gene reconstruction. Current Opinion in Structural Biology, 20:360-366 (2010).
[0606] Katoh K, Standley D M. MAFFT multiple sequence alignment software version 7: improvements in performance and usability. Mol Biol Evol. 2013; 30 (4): 772-780. doi: 10.1093/molbev/mst010
[0607] Stamatakis, A. RAXML version 8: a tool for phylogenetic analysis and post-analysis of large phylogenies. Bioinformatics 30 (9), 1312-1313 (2014).
[0608] Yang, Z. PAML 4: a program package for phylogenetic analysis by maximum likelihood. Molecular Biology and Evolution 24:1586-1591 (2007).

[0609] While preferred embodiments of the present disclosure have been shown and described herein, it will be obvious to those skilled in the art that such embodiments are provided by way of example only. It is not intended that the disclosure be limited by the specific examples provided within the specification. While the disclosure has been described with reference to the aforementioned specification, the descriptions and illustrations of the embodiments herein are not meant to be construed in a limiting sense. Numerous variations, changes, and substitutions will now occur to those skilled in the art without departing from the disclosure. Furthermore, it shall be understood that all aspects of the disclosure are not limited to the specific depictions, configurations, or relative proportions set forth herein which depend upon a variety of conditions and variables. It should be understood that various alternatives to the embodiments of the disclosure described herein may be employed in practicing the disclosure. It is therefore contemplated that the disclosure shall also cover any such alternatives, modifications, variations, or equivalents. It is intended that the following claims define the scope of the disclosure and that methods and structures within the scope of these claims and their equivalents be covered thereby.

The application's sequence listing, which the Patent Office published only in electronic form, follows.

SEQUENCE LISTING (2275 sequences)

SEQ ID NO: 1 - protein, 1311 aa, synthetic construct
MMYTTKSILCRRLPRLRQAENQVSSACRVRTEKGITLLEGVHEAILENSSTRCGSGVTKQPVATLEKGCSTTLTWRHLDILIAGMGWKNDSEVCVRTAKRRATKSSEVSVHQGTCCVDTGDFTDLTDNLSFVESNDGDEPSIGGQDEPNEEETSLEAGGEIEGTHANFLGEATLEVEEIQALEDPQPNLEIQEQAEMPNQEIQAQVDELPDQENQGEVNLRGRPIVDGNKIYYEYNSESGGAWECGQCPEAFPDVKKLESHYRGTHLDCVVKFNCSKCGRNFVANGILIHYRKWCKGRPIRVDPDRNPHQCSECDYSAASKRGLSQHERHRHPELRNLKRIAQRGEDARRKRTARKLIRPPGRGGKLWSAEEDDILERLCIVHQGTRLINMAIAGTGLLPGKTNLHIGERRRQWKEMKAKQVEEGLSEAMANISLEPPVLPTQRCLTELETYLEDVKGIAVKSDIGTTLWACLNDHVNGQALQSEQIDEITKKIVIELGKANPRAKRTGKTNRKKGKKANNGATEFSRIQRLFATRRKVLVKELLDGKRDADCPLDVKVVEQTYQGRFGGESKIVNLQGFPAPESLADNSELLRPINRLEVRQALGGMKNDSATGPDGVKVLPVKNLENRTGTISLILNAWLYSGIVPKGTKANRSILLPKTEEGLEDVGNWRPLTISSVVLRCYTKILAKRLLKALPLNERQKGFRQLPGCSENVTLVNEVISMAKQDSKELAIVFLDLAKAFDTVSHDHLVKSLKRFGVDMKFIDIVVQLYAEASTSFTVGLKMTDIILMLCGVKQGDPLSPILFLACMDPLMCSLETRGAGLLLAHGVTVTTMAYADDTAVVAGSKAGMEKNLELVKEFCLETGLKLNVKKSVGFHLRPIGKSYTVNEGSQFECGGEAFPWVMPGSVTKYLGAKFDPWRGIPVVDPCKKLEGWAQRIHRAPLKPRQKVSLLSDYACARLMYHMSTATPSRGRLDNLDSIVRYWVKRWLKLSDSTNTHFFYTGWKEGGLGISKFAASVPHMIVGKFEAVLRSKDPVLVTLSGIRNLRQRVDKIKEKYHVCGLKTDTQKASWREEESKSWAKLISQGKGVECMAGNPQSNTWINGESFMTESEYIAALQLRTNTYPTRECTNRGRAGANIMCRRCGLAVETIGHISGWCLEVKDNRIARHNRIVYKVKAMAEKKGFRTLLEPKVKVDGRTLVPDLIIYDGASQKAIVIDPTVVWDDSGTALDDAARRKVEKYTCIIPAVKTLTGCKEVRIQALVMGCRGSWHGGNDGLVQPLGWKRHDIKNLCLLTLCGTLKLIRYFMDK

SEQ ID NO: 2 - protein, 1021 aa, synthetic construct
MYILRNVIQTQLTKNQSGSISAFGAIFPVIPKLVLVYMHVVPXXXXXXXXXXALIKYFPDRSLESIKGARKNLKYKEILSSLKEAIASNNLTAPSFNDTQNISVESINPDSPMSSLRRSNRVLPASPLNLNSRRRRLPKRPDAEPDPESDPDPDPDPLPASLPNPIIDDDPFISAIRNSYDCDQELKRLCELGFDLTLDYNELNNYIKNRHTYPYKSNKVTKNTDTTNYRRKIKLKRYARFQQMYRRNKRNLADMIINDKEEASVFPTEESIRQTYQNLYESVSPADDHPITDYKVSGSCYFPIDTAELRNHLKTMNASSPGVDNVTLQHLRELSPDYILTILNFQLWAMTQMETWKTNKTILIPKKNEGLENASNWRPITLSSMFTRLLHRILASRISNNTSLNPRQKAFVPVDGCAQNTLLLDNLINSARQEHKQLSIFGIDLSKAFDMVSINSIRRALRRHCIEEQLIEYIIDAYSDATTSITCGSITINNIKLLRGVKQGDPLSPILFNLIIDELIDILPPEIGGFVGESRVNCLAFADDIILISESKVGMEQLIHKTEDFFNKRSMKINGDKCFSLRLSTTKKDRAPLIIKEPSYKIDGNWVKATGYDDFFKYLGVKFNPHGKMKPNINQLETMLHRVKQAPLKPYQKLELLRNNVIPKILHEMVLGRITKGLLLAYDTKIRGFVASILDLPHDIPKSFYYSKIKEGGLGLPSLEYSIPRSLLRRVEKMQYSNDEVIKSLYNHHLTEKLRNKCLTLTEMLDIPSALSITNHNKFKNDLYSKIDGKPLAEFKSNDSGQLWLTGKTTIVTGKKFKQLVKLRIGRLATLENCNRGRDVNKSCRKCSRVNESLQHVIQHCHFTHFDRMRRHDAVAELLKQKSLENGYTVMWEPVFTLTGEKLKPDLVVITENTINVVDVSIVTENMRFQHCNTPSTLEGAWDWKVVQYEKEELTNQLKASFGEKPVWYGALILSLRGIWCSKNDITLKRLNISKSIKELIIVRSMEHSVTIWSHFMNSVI

SEQ ID NO: 3 - protein, 1120 aa, synthetic construct
MSHSTAAASSGAATGPIVIRYPVNTTNGGTTGEQACFFAESSNCGLAFVDNKSFVDHLLRAHKATRDQIQYICSHCHRQFEKIESVRSHHNICKRKEAVAPDLDARLPVECEVDGCSRRFTTTSGMRLHVKKAHPIEYHASIPQSKRNLWSEGEMRMLARMELDNPGLTNARMNELLHSLHPSRSVDVIRHMRGRNTRYREIMEELVLIGVPEDSDSQAEKTAEPEPEGRINECQLEELVKTHSQIDDARYQASIEYVRRVLRSDDPGEFFNDWLFSCFPGKEGRRIQRRKRERLPPRNAKQKRAAEFRVLQELWRKDRSRLATVILDKMPPTAKEPPIGDIEKVYTTRFERPSPEDQHEFTSKPIEEPMEMVRFITVEEVLKNLKAMKSNNAPGLDSNITMKRLRSLPLPCLQLVFNCWLAIGKAPQSMKQCRSKLLPKGAEGLDDVNNWRPLTIGSLLIRLYTRILAMRLQSKVQLHPRQKAFQPLDGCGENIAIVSSLLQDAHERKKELNIIFLDIAKAFDCVSHHSIQRALNRFGLPRAFRRVIEDLYDGATTVFQTSEGDSKTLGISSGVKQGCPLSPVLFNMVMDELIADAPSTEWGYELHDESVGLLAFADDIALVSHSRAMMSHALDYAAGFFEKRNLQLNARKCIGLSIKKAPRRKVMRIEMGSIWSLRNGSDNIPIKMLSPADMARYLGALFSPSGKQTIDLATMKGWITSIEKSRLKPHQKLVMLRTYLLPRVLHHLTIGEPNATTLRRVERELRNSVKRFLKLPVATATPFFHISTKEGGLELPPLLETIAKRKLKWEIRLQKSKDSLIRAVADSPKFRKQFDKARAWIGVPVINRPSDINRRIRELNNGRFERFTSELAVQSRCHRALASNPLRNDWLTGHNPGLYASQFIDALKLVTSQLPTREALNRGNPQADKRCRGCGFSVENQKHVISNCPLVQQERHLRHNRVAQLFARYAKEKGWNIIAEPRIRNPSGEIMRPDIVLRRDDNVAIVDIQIPYEDGGREQLAERYRQKCSKYRQLSTHIQHVLGVTNHTIGAIIVGACGTWCELNNPILDYIGVNTTAIKKNLSIEALRGTLKIFGQFKNRVFRNERVHPSQRPSSGPPVP

SEQ ID NO: 4 - protein, 1221 aa, synthetic construct
MVTIYTEFKTDPGAGARVVALRVDAGAKAGYVILRSEGVHGHGYSGSGSRDRALSAAGKIDEPMETLDRKSSFRLPFKILIFESGRREMDGELSPSLDFVNRALDVQESREEEALTLGSEEPTEPLSNGSVYMPASSTERGIADLAEDGQTGKLLIPMPLRTVACPCNQVFCNVYEFEIHMERAHMGIDVKYTCDLCGKHCLRVHGAKIHRSLCRGNTIRPVIPRPWKCEACEEAFRSKSGLSQHKRHRHPALRNLERKAKYVKEPGQAKPLFKATKLWSIEETKRLLELENEFQGNKNINKLIAAQLAGKSNKQVSDRRRTVHKAKTNISQDKGVTAGRNEDRVTGPGMAVSETVTDPEAFWDFVTGARNSGVEGESHQKTLQVLVDLLQEGNVERACSQVSEILADITPVTKPQSKSKKGQGPKNRRKSQAKAEAYRHAQQLFETNKKSLVAELLEGAESTKCPLSVETVYEAYKARFETESPEVDMSHFPPPVNGMDCDNILKPITGEEVYKAVRKTRPDSASGPDKIDVRSIRKWDPRGIKLAAVFNIFLLTGKVPDAVRPNRSILLYKGGETTQVGNWRPLTIGCMVLRLYTKVLAARFMFATPISPCQRGFVSGGSCNENVHLVEGLVRDAKRRNKPIGVCFLDLAKAFDTVSHKHVLAGLTRFGASKHVTRIVEDLYRGASTRFTIPDGTTGEIEMKRGVKQGDPLSPVLFNIALDPLFCLVEKAGVPYELEDGTPVSVAGYADDTMVVSNNKNDLQANINLVEEFCRAAKLKLNAKKSYAYTIRPIAKTYVVNCGDQLRIEAEAITWIEPGDTAKYLGVEQSPWIRKVKDNPTEDLKSWCSKLGRAPLKGRQKLLLLSRHVLPKLKYRLANSDPSKEVLAGLDSVSREYTKRWMNLPACVSSAFLHCSVQDGGVGLPSLATEVPLDKIGSMSRLIGSQDGHVKRLAKAIGIEEQLETTCRRWEIRRPLNKMRCVVNEIRKRRRVEWENLGSQGPRGPYWRRCRASNGWMRRDVLSEGEHTVALQLRTNTYPTREAMSRGRKGTNVMCRRCGQSVETLGHITGQCLAVKGNRIKRHNKVCGILVSAAQSQSWEVMIEPHFKVEDKTYIPDLVFLRGEQAVIVDPTVVWESNSNSLSEAARKKVVKYNPILKTVKDLTGKSSVLLFGFPVGGRGTWCRGNNKVLDALGIPRSKAQYICLTVLGDTLRMLRVFMDK

SEQ ID NO: 5 - protein, 1355 aa, synthetic construct
MAERNCSATYIEGATAPSSASSGVGAGDDCPEVVDPPGTATCEVCDAKYRTGRGLSLHQRSRHPEWYHSRKGPAFVRPGWTREEMVLLVRGEVRLVRAARRRGEEGRVKVNAELCRQFPGKKRDSIVNVRKTKNYRDLRARLEIELEEESDEEVERVVPAPEVGLVPVEMREGGGGGEVGLVASGGGGDLSPTPSQVERKWVTPVPKDRKGPKLRWGEELLEEVAREELRLSGLNTRFMNAALRNSFPSRTLEAIKGMRRKPKYKLLLASLCAPNPAVTPPGPSQSEEGTMLPEVEGSGEGCSPEREFVTPTVSVNFTGPLQPTFVEGISPPSVIRLPVASDPPKGGRPEIVSDECNVTGLVHMDSVDHDCTLVPTESTIGDITLCDHSVVEIDSLLVDTPPRRREGEVIESTVRDDRRGDEGGEVRLPTEPDEDSESESEPSSQPCNPRQGDVSQTVGEGGGRTVAGREPMDYETWEAELREELVCAQGFLAGMDSLEFLDFQPGQLSREHREMLDSEYQRWVELELGSSHRRKGPRRRARRREAAGRKEAAGPAEAGGRRKRRRTEYARVQKLYRSNRGECSRKVLSGEWRSEETPSIPLEDQVVFWSRVFGEESVPDTRTGSPQGMVLWGLVEPITVEEIFSTLRKTKDGAVGLDKISRKEISKLNPRALQAHFNLWLYAGYQPIEFRRSRTVLIPKVQEPSGPGQFRPIAIGSFISRVFHRLLAERLSGLLEFQSRQRAFVKGDGIADNVFLLRCLLRDTCVDLKPMCLAFLDVSKAFDSVSHATLLLAAERMGAPGPFISYLRTLYSEASTVLHVDGRFSDSLKQNRGVRQGDPLSPLLFNCVIDWALASLDTEMGKVVGGGPRLNHLAFADDVVIIAESVVGLQHLCGQFERSLGRCGLTLNVEKSRTLRIAVDGKAKRWVCEPTPFVSLAGGLMPAVTITQAYKYLGVHISARERDATPEELLTRGLNQLKAAPLKPQQRMYMLRTHLLPKLHHKLVLSRSRGGVLNRLDRLVRKSVRSWLALPHDTTNVFIHCDSRHGGLGIPALRLTIPLMKSARLRRLAALRDPVFVALIASSRTFAEEVRRCGEPVKIGDSTVTSAPAVKEALAEQLYSSADGYGLRSSAGVPYVHSWVSDGTALMSGSAYIHAIQVRGATLATKKRAARGRPDANTACECCGRTETLGHVLQVCHRTWGSRIKRHDALMEKFLHSLEIRGGSILRAPVIPVVGGSPQKPDGVIYFQSHCWVVDASVVADNADLDNAHLSKCAKYDTPAVRDWCQLNWPSHEGVRGSIRFGALIFNWRGVMSRRSARMCDELKVPRATVKLFAVGVVEAGWRMFREFHRSTAQW

SEQ ID NO: 6 - protein, 1109 aa, synthetic construct
MPAGTSPPVRWQDKETVPVIAAESDGRCLDCGKQFKGQRGLSLHSRSAHPELYHKKGSAEIAQTIREQTRTRWDGEESAVMAHEEVRLLRQGCMELNKELSKFMTGRSFHSVKSHRRQQSYRALVKAYVPTTGGLGVKEVAIPPRKTTRVVGEMAPRPHADPREDEVGQPLQRPAARVAEACPPRLHSPPQQSTNQPPAEAAEVAFPWPNPLDEHEVELPETVGIDTPTRAKVAPTQEQEIHAGDEFDWRTPIRQTIIDLATGINIQPELLQSSTQNPPADSGRLQNLIDQDIMELLPPVVRKGQNMRPGVQRRVAQSSREKRRAAYSRTQALYKKSRTSCARTVLTGKWREVAPNLSLREQEAFWAPLLETPSIPDRRAPPGDGAPEWDIMAPITTDEVARHLRGMKDGATGPDNRTLNDVRKLGVAALACRFNVWMLTGIAPEAFRHGVTVLIPKTPEGAEPHDYRPITIGPILGRAFHRILAERIERHYRICGRQKAFRKGDGIGENTFLLRTVIADRKARNQSTNVAFLDVSKAFDSVSHDSIFLAAASAGIPDPLVTYIKSVYAGSQTQLRVDGTLSRAISVNRGVKQGDPLSPVLFNSVIDLALRKIDDEIGVSIGTDKLSCLAFADDLVLLASTPRGLQSQFKNIELALGKSGLKLNVNKSATIRLDVDGKRKTWVCNPSDFLRGQDGQLVKAMSITDGYKYLGNSVSAGVTLGSTVQDLQRGVRELTAAPLKPQQRMYILRNNLIPSLHHTAVLGCLHKKSLKFLDQITRAAARAWLRLPKDTPLAFFHADYQDGGLSIPSLRWTIPLMKTKRMAGAVASRDPMVRAIAQLPIFARERRRWSAPLAAFGVPIINGAGLKRAMAVGLHTSVDGHGLAGSRVTGYVNHWMVSGTALMSGSGFVNCVRIKGNLPYTKARAARGRPERSVKCDACRGHETLGHILQTCPRTHQPRNDRHDRVNKYLTSTLGKLGFTTRVEPAIATPAGVRYPDLIVWKGDTCAVIDTTIVADNFDPDDAHERKVVYYDTPAIRTWCADISGVPADKIKFSACVLTWRGMPSTRSVRELQALGVSKANWGLMSVKTLEGAVESYAHFGKSTAGFSG

SEQ ID NO: 7 - protein, 1151 aa, synthetic construct
MPLVSEVNDGECVECGKQYKNKRGLAIHERSAHAEIYHARCATIIEETHRTQRKSRWDSEESAVMARAESKLVRQGLYAINQALVKVTAGRTLEAIKSHRKLPAYRQMVRSYLRTTGGLIVDEAVVPARIVAEVTGGATSGPQDDNSRQVDDRSSPVATRVAEVRSPGPQPATLAFASGPAGPTGRSNGRNMTDNQITTMADVHQVLTGRIPSGAICPPDGKNKRNVTPRPEARVAETRPLSPIITRWSDDETDGDPLPETQNVNTPVREDRERVSQGIAEGIVGGYDWRAPVKTELLNLAIDANICPELLHEVLLSPCGDRELLQELIDVDLLGFFPPAERPRRNVRRRPEQQAPVTSRAKRRAAYSRVQALYKKSRTSCARTILAGKWREVAPSVELREQVAYWKTLFEQESQEDSREPPAEGPPEWEIVNPVTKDEVARHMRGLKDGAAGPDGKLRKDLKGLSTGALAARFNLWLLAGMAPDAFREGVTVLIPKSNDSTLPQDHRPITLGPILCRLYHRILAERVERHYRISERQKAFRRGDGLAENCYILRTVIDDRKARCQATNIAFIDVSKAFDSVSHESIFLAAASAGIPDPLVDYVRSVYGGLRTRIRANGELSEVIAVNRGVRQGDPLSPVLFNAVIDLALRHIDPEIGVKVDSERLSCLAFADDLVLLASTPQGLQKQFSGVEKALCRSGLALNVGKSATLRLDVHGKRKRWACNPVGFLKCRNGGTMRAMSVTDGYMYLGNTVSAGVASEKSVLILKAGISELTQAPLKPQQRMYILRNNLIPSLMHSAVLGSISKKSLKFLDTMNRAAVRSWLRLPRDTPFGYFHADFRDGGLSVTPLLWTVPLLRTKRMTKLVASPDPVARAVSRLPIFARERNRWSRPLSAYGLPIRDAVGIKRAMAEGLHTSVDGRGLNGSFASGHVNAWMTSGTARMTGSGYVNCIRIKGNLPYTKARAARGRPEKPIRCDACNEVESLGHILQRCSRTHQPRNDRHDKINKFLTQSLKKLGFHTQVEPPIPTPQGVRYPDLVAWRDGRCVVIDTTVVADNRNPDEAHARKATYYDTAGVREWCADKSGVPAKDISMSACALTWRGIPSQRSVRELATWGITKSHWQVMSIQALEGSVKCYAHFFHSTSGTRAVP

SEQ ID NO: 8 - protein, 1056 aa, synthetic construct
MYPTSAEVPQPCPVCLSSLIDPKQIRDHFRKKHHGVLMHWTCRKCGRFWPNNKSAASHYRYCIKSLPSLEGPSKSHKCIECGGSFSTLAGLQLHRKRKHPEAYNESLPRPTGKNRPWGDDELKRLAAVELDSGGTKHINIKCQKHLPHRTIEAIASIRKTDRYRIILREIRSSRSISRETREEATTSTPDSSNVLERLTSRIAELKSGDYSPSVEAILAYTERCLEDRNASSGLSLLPSEMYMPKPTSASKINRGMRTPFRPQNRTQRRRQHYQQVQLLYKRDRKQAAGVILDGSPLHVVQPDVEKVDEIFRSRFSRPSPPDDAEFISSPAGVLNMDYITAGEIQQCRDSMKKNNAPGPDRNITMDVLLALELPVLELLFNTWLALKQVPAAFKTARTILIPKSGDTSDPNNWRPITICSLISRLYAKLLASRLSKCANLSERQKAFRPVDGCGENTAILSAVIAQARKTKSQLHVVFLDLAKAFDTIPHTSIVRALKRKALPGHFIDVVENLYTEATTSISVGGKNTSSMPLTSGVKQGCPLSPILFNLVLDELITLIGDDNGVDLNDKKIAILAFADDLVLLSPTTDGMETNLKLCEGFFDKRSMKLNARKSVSLSIVRAHKRKTMLTDERPKWKVHGEFLPTIKHTEEIKYLGVRYSAAGRSIAKFPKLDQWLQRLKKAPLKPQQRIQMVRSTITSRLIHTLRLSRVHAKLLKDLDRKIRSFVKSVLHLPSGTSTDFFYIPVLKGGLGLQEFMTLIPAAKLKLINSMKKSSDQAVIAAMEVDHWLREERWCRKVTLNQGNKNDAERRRLARYINSPRGKSQVGFANLPGQCRWLEGGAKLTGHEYIVGCHLMSNTLPVRTRTFHGGRDRVVTCRYCPGVLETPSHALQSCPVVRNAVTKRHDLILTKLQHFLTPNYDSVIREPWFNGREGRMNPDLVLKQGKMVYVVDLTIPYDSSPEFIDSQAQRKVAKYDTLKPLLQQKFQAERVEVIGLALGARGMYTSAGIQTCLKLGLSDRQRRYMGMMALRLTCAVWGIFRSQPSGLFNKVPDTGTT

SEQ ID NO: 9 - protein, 1005 aa, synthetic construct
MRTKHPQAYEESKKVANIRIAWSNDEDNILANLEISLKSTQKGQILERLFNEWNKLVVQSHANYRSKDAIRARRQQQEYKAILRDLIQKQDDTNASSDDNDSSTDSDSPSIPATICNDMNAIHKLLNDIVIAGHIKLSDHMKNAIDAFLNPNKAIDPVKLTMSGINQSITDIRNKNNNNRNSSRVNGTATAINKKPARNKSRIEKSKQHAYYQRLYLKNKSRLMDEIIDGVAPNVDPPPIHTAIQYYEQIWSILVQDTHPVTTKPDFNNKDNTLLSPITKVEIQWAIKKTKRDSAKGVDQITLQEAKLLAEDDLYIAFNIWLGCKTIPSDLKLNRTTLIPKGKQGLDMITNWRPITISSILLRLFNKIIACRMNKYFEIDKRQLGFRPINGCSMNILWLHHLLKHARLNRRDLYVCLIDVAKAFDSVPHESIFRALVRHHAPSSFVELVRNQYADSYTSITYKNLSSKRIKILRGVKQGDSLSPLLFNLVTDELFGILKDQLGYNITNIGSSNIKCFADDICLISGSRIGMGHMISETVSFLNDRNLQVNANKCMSIGLQKGFKGKKSKIVTEPIFTINGSLIPILGHVENHTKYLGIQFTSVGMVNANVAKDRIIMVLNKLQKIPLKPQQKIDLIRSHVIPLFIYQLINLENYPKLLKEIDILIRRAIRSILHLNIGLSIEFFYLPIRDGGLQIPLLRDIVGLAKVRIYKYIMRSDDELLKHLVQKQAFPILHRFINELKLDSSYETSDIKLRKIQLVKDRRVSYAGKVHGYGSEVFSTCPSTNFWLYGDNKTVTGRTYINGIKLRTNTLETRVTVTRGCMVDKTCRMCKEENESLMHILQFCKTTKGLRYARHNSVCARVVKKLKERGFQVYVEQAYTTDETGLPTLLRPDIIAVKLDHAYVLDVQAVYESSGASFINAYKFKVDKYTPLIQAIKNRHKCKDVTIHGLIIGSRASFHHGHIRIWNEFGFSSSELKYMALNCLENSLRIWSTFNFNRLNSFNRS

SEQ ID NO: 10 - protein, 1009 aa, synthetic construct
MEVAGITPGNGEAIGVEVVFPDTQERVQMGVDEDDNTRHPVSEIEEGAGINPGNGEEVDVDAIHSDSQEQMRVDEDENAGHPVSENEEVVGNAPDNGELEVAGVTPGNGDLVDVHLVSQAAGIDEAVGSGLHVGAGIAPSESVEAFRAALRSLVVEGGLSGLVRDAVVNVLNDEGGERIGSVLKDLVQAIGLENATTPGTARRPGHRGGFGRHRHVGNKAASMYAGFQAMMTRNPSEVARWLWEGRAGEEGNVVPPMDHLVRIFGSVMSVDGVEDNEQIASCQEGVKVFYPVTSQDLDKALNKANASAPGLDGLRIESLKRMSGDNKSNAVALVNLALLAFGNYERTVRTVMIPKSTEHLEDADNWRPIAIASHIIRVGHRVLAHRLESQVKLHPAQRGFTRGDGLARNVWLLDAIIKHARVNNRTLCVVSLDIKKAFPSVSHSSIARAVDRFGCSPVFCEYIRSVYRDNATVLQCGKSVSDAILVKRGVRQGDPMSSVLFNMVMDELLCLLDPALGYKFDGTCVKAMAYADDLVLVARSVGAMKKLLTGTEEFLLKRGLMLNEKKSVALHLRRGKRAVVLSLEEVWSLREGAIGMVSEIKSLTYLGVRFGPYGKMNYDTKPLSDALGRLCRAPLKPDQKLLLLKTHLLPKALHSLTLGCCDKKLLKTLDMRVQHAVRSILHIKKDVPCAFIHGPSKHGGLGVMSFVADVPRHVCNRIEGVQLAGEGGEMRALVDSFYFESILRKLRTPATQVPDEYVAHLSRKNCRRNMSVRLKQADMSSKYDTRGITEVAEHGDSRAWLASKPVFWPARTYVNAVQWRCLSITCRSRVSHGRAGDRLCRTGCGKIETAFHISQVCPSTHLARVARHDRIVQLIKRSAESKGHAVVVEPRITTAAGIRKPDLVIANARSKTVFVVDVHVAWKGLRQAFDAKVKKYGRHKEISDFGRTLLPEAERVQFGAIVVSPRVIWAGANEQVVNGLQLPHGIRKVVLASCVEGTMKILSAFNAVQ

SEQ ID NO: 11 - protein, 1347 aa, synthetic construct
MHRSSPERRILDGGAAAPPSTLAGPDGNEPGSWVTCGLCGRRFASARGLSQHERKEHPEHYHSVNIPKVVRQGWSNDECVLVAREELRLVREGKKRGVTGRVNVNADLCRAFPHRTMDAMKGLRKNLKYLSLRTRLADEEMVRPPAEAPESPERVFTVGDEDRRWTTPEPKDRRGPKVRWSNILLDDVAMCEAQLSLGGCTNYNIELHKIFPERTLEGIKGMRRLAKYRVRVARYLAEEAAQGTPPGMDRSPHGPSGEREGDMPRCGRNESSSGSEGPAFDCGDTPPVPPCNPGRLDENRTVRDGDASGGDSPRDNRRPRGEDIGPRERGLGAHTERTSPAREVGEGASRPGETGVVPPIPLCNPGRQDASQTVRDGDAVGGTTMVDTVSLVDVSSPSWASQIDLLDLADGTEAHVNVETDSPAGSPAGGSSWACPAEEIPEAADPSEPMLEVPSANTDNINRDHDSWRESLRQELVLAQGYFVGWDSLEFLDFRPGQLSREHKMLIDSEYEEWVRLELGSAHKRKGPRRRARRREAAVREEATGPAAPMSKRKRRRADYARVQKLYRANRGECSRKILSGEWHTEAPPSIPLEDQVFFWSRVFGEASQVDERVVHPQGMVLWSLVRAITADEIYAALRKSKQGAAGLDKISRDDIRKFDPRALLAHFNLWLYVGYQPAEFRRSRTVLIPKVPDPSGPGEFRPIAISSYISRVFHRLLAGRLSGLLEFNSRQRAFVKGDGIADNVFLLRCLLRDRCDALKPLSVAFLDVSKAFDSVSHASLLLAAERMGVPGPFISYLRSLYTEASTVLQVDGQLSGPMVQNRGVKQGDPLSPLLFNCVIDWALASLDPEMGVIAGEGPRLNHLAFADDVVIICQSSIGCQHLCRQFEKALGRCGLRLNADKSRTLRIAVDGKAKKWVCDPNPFLSLAGGVLPAIPITQGYKYLGVTISARERDATPEELLRRGLKHLTEAPLKPQQRLYFLRNHLLPKLHHRLVLARTRGGVLRQLDKLVRRGVRQWLKLPHDATNAYLHAEVRDGGLGIPSLRATIPFMKRDRLERLAGSSDPMISHMVANSGTFARECANCSRPPVRVGSTLVMSRDEARRVTAEQLHASADGYGLAPSAAVPFIHSWVSDGTALMTGGAFIHAVQIRGATVSTRRRSARGRPEASYSCDACGRPETLGHILQVCHRTWGHRIKRHDAVLEKLLHELERRGWSVLRAPVIKVRCGSPQIPDGIAYKDGICWVIDASVVADNADLDDAHLSKCTKYDTPAVRDWCQSNWPSEVAAGVVRFGALVFSWRGMMSPRSARMCHELGIPQGNMKLMACCVVEWGWRIYRVFSRSTASWV

SEQ ID NO: 12 - protein, 1314 aa, synthetic construct
MSLGKSDGQCAASTSRCEGGAQGPARTPPLQRGTPPPAQVTPGLSHSTRDNPEVICLDTPPAMPATSLPATLTTTTVTTVACGGPIMSTLGLPTGGHITSPRPSPASDQQTPPGAVWVTPMERTPIPSGEVERRQQGAVTPSPPPPQETSRDEGDSDGPWRVRLGRRARRRLSSGSSGGKSPPTTSADNNNNSLNLQNNLINNNVEVSMSNNILQQANAFLVLGTSVASGPSPLDDGGAPGDMRAEDHSAGHPSVPVSVCGVMGRPRGARASVDSGANEQTPSEPQRGGGGHHRRPRRVEVAPVQPFRGQPAPAVAARQRRRQRVVARDALVGRAEAVASLADLEEFAASVALFFGEEAVGVARGDAPGARDRPVRLRAARGRRGEGRVPARDGANVERGPVPAGPQQRQLGEGRGDWTREAKRIQALYRVNRRRAIREVLQGPAEFCRVPTRRVQAYFEDLYRGGERLDNAGAEAERVDPPRREDVELLMAPFTEREVDCRIRRMNNSAPGPDGLTYRDLRAADPGARLLAAFFNACYRLEAVPASWKTSNTVLVHKKDDPGLLENWRPLALGDTTPKLFAALVADRLTGWAINNNKLSPAQKGFLRDEGCFEHNFVLQEILTEARRARRQAVVAWLDLSNAFGSVPHAVIRRALVRAGVPGGLINVWGSMYDGCTTRVRTADGYTAPVPIRSGVRQGCPLSPIVFDFAIDSVLRAVTAVDAGFDLSGLRFSTLAYADDIALVADSPEGMRRLLAAAEDGASSVGLRFNPAKCATLHIGEGAGGRVLPTTFVIQGQSVHHLACGEPYKHLGVPTGSAVDQTPYATIGGLLEDVRAVDRSLLAPWQRVETVAVNLLPRLDFLLRGATVEKRPLTVADKTIRRTAKAWLNLPQRASAEVVYLPPSLGGCGLFPLADLADVLSVAHVFRMLTASDAAVRELAWSSLRGVVSRRIGRRPSNDDIAAFLSGSLEGRMRDGGEKSLWSRARNAARRQSERLSLRRVWSEATGEMIVECRGTRGDTVRVPPEARSQVITRLRSAVMAFYCSRLSSKPDQGKVFEVSSRARVSNHFVRGGSFTRFADWRFIHRARLDVLPLNGARRWGEGDKRCRRCGQAAETLPHVICHCGVHSAAIQLRHDAVLHRLWRACRMPGEKRVNQRVEGVHGELAELRPDLVIRHEPTKCVVICDVTVPFENRRQAFHDARARKLAKYSPLAEALRREGYRVVVTAFVVGALGSWDPANEAVLRLLRIGNAYGSMMRRLVVSDSIRWSRDIYVGHVSGVRQYAAPPRPAVDGALATPPRAIRRRWPANRVNVN

SEQ ID NO: 13 - protein, 969 aa, synthetic construct
MAGLQLHRKRKHPEAYNESLPRPTGKNRPWGDDELKRLAAVELDSGGTKHINIKCQKHLPHRTIEAIASIRKTDRYRIILREIRSSRSISRETREEATTSTPDSSNVLERLTSRIAELKSGDYSPSVEAILAYTERCLEDRNASSGLSLLPSEMYMPKPTSASKINRGMRTPFRPQNRTQRRRQHYQQVQLLYKRDRKQAAGVILDGSPLHVVQPDVEKVDEIFRSRFSRPSPPDDAEFISSPAGVLNMDYITAGEIQQCRDSMKKNNAPGPDRNITMDVLLALELPVLELLFNTWLALKQVPAAFKTARTILIPKSGDTSDPNNWRPITICSLISRLYAKLLASRLSKCANLSERQKAFRPVDGCGENTAILSAVIAQARKTKSQLHVVFLDLAKAFDTIPHTSIVRALKRKALPGHFIDVVENLYTEATTSISVGGKNTSSMPLTSGVKQGCPLSPILFNLVLDELITLIGDDNGVDLNDKKIAILAFADDLVLLSPTTDGMETNLKLCEGFFDKRSMKLNARKSVSLSIVRAHKRKTMLTDERPKWKVHGEFLPTIKHTEEIKYLGVRYSAAGRSIAKFPKLDQWLQRLKKAPLKPQQRIQMVRSTITSRLIHTLRLSRVHAKLLKDLDRKIRSFVKSVLHLPSGTSTDFFYIPVLKGGLGLQEFMTLIPAAKLKLINSMKKSSDQAVIAAMEVDHWLREERWCRKVTLNQGNKNDAERRRLARYINSPRGKSQVGFANLPGQCRWLEGGAKLTGHEYIVGCHLMSNTLPVRTRTFHGGRDRVVTCRYCPGVLETPSHALQSCPVVRNAVTKRHDLILTKLQHFLTPNYDSVIREPWFNGREGRMNPDLVLKQGKMVYVVDLTIPYDSSPEFIDSQAQRKVAKYDTLKPLLQQKFQAERVEVIGLALGARGMYTSAGIQTCLKLGLSDRQRRYMGMMALRLTCAVWGIFRSQPSGLFNKVPDTGTT

SEQ ID NO: 14 - protein, 1269 aa, synthetic construct
MDAHVDLALPCIRVCSPKCIKPLATTTRNKTSVLSVMEQVPSRVDSDSLHGAQSIGGAVHSCVDCGRSFDSVRGLKQHVNRFCKGKAAGSSAEGSEVGTVAESSAGGDVQTSTTELIQCPAVTTSKTGEGSATCSQKLEHVQTPSRQSADDSVEDLDPRMCVHASTGTHCEKCQWCGRCWLTLQSLRQHQRRTHREEYQTKLCEEHQLKKARWTKEEEVRLAETEVELRKSGQFRNLNVELAERFPTRTVESIKARRHRSETYMQLVQELSEHCPGLLEMASIRGSTSTIGEQGDAHGDAPSEVASTEQADNYAVLCAASEFPDQNHVSSVQTSAVVHHSIREENEFDDSIFGPVSGSTAVGIGAEMSEKKDTTAQSPSELSDWKNPIYYYIEGLPVATTVDDSGERLLDRAFEMEKGALTDVRDGLIDRHAQQFLWITRDGQKRHQRKGDSRREKRESRKSRLGQDTSAAEGTGGPSRRAKRRQLYALLQKLYEKDRNHAAELVINSEWQGLLEKKVVNKEAQVLYWKQLFERRSVPDQRPYSTQVVKWDLLEPITVEEVQKQLLQAKETAPGPDGVELVDLHSYTARHLCKAFNLWLLRGRVPEALTKSRTVLIPKKLGAEDPRDFRPITVSSLILRIFHKVLMDRLQRHISINPRQKGFVPVDGCFENLYLLDAILWRAKRYLRPLFVAFLDIKKAFDSVNHDSLVRALKKNGIPSPLCDYLSSNLRLGKTELHGQPVEMRRGVKQGDPVSPFEFNLVMDDAASYLNQHLGVEFDDGEQLTHGFFADDTFIVAPSLAALQQQLTKFESGLQANGLELNVDKCYWFGIEVDGKHKRWFQDMRGELNFLGEKVTRISPADTFKYLGVHLNVFGKRMFDPARLVTALHSTTSAPLKPQQRIYILKNYIIPRFLHQLVLGKVSQQLLASVDRIVRKFVRQWIAFPTDTPLGVFYAPVRHGGLGLPQLQGLIPNLRMIRLQRVLSAESDPLILHISADTEFADDVYKRCGWPARVKGLRIGSKKELNDYWVNSLYSSVDGRGLREASNVPQVHTWVDDGSKILSGSQYIHWLKVRYNLEPTRSRKSRGREENPRVCDKGCCAVETLAHIVQSCPATWGIRIRRHNTVLALLGQCLSRKGWKMKLEPQIRYRSTTLKPDLVAARDGRALVVDVQVVADSTEHTLHAAHCTKLQKYDVPEVLEYAREVAGSPTAPVVVTSCTINWRGCWSESLAGALRQAGLSWAQVRLLALRALQGTASCYIGFCRTAGACS

SEQ ID NO: 15 - protein, 1221 aa, synthetic construct
MKRLDHQNRPVARFSCAGQNDELVHRARKKCSRCLGLTSLFSVHLVTKMNLMNMGSPPGDALQVKSEGLGTASGIGNGIDGCCPVCGKTYKGSRGMRIHWRAVHPESFHSRETTRLESAERKTKCRWSQEETSALALHESRIVRRGCPTGRRDLNEQLARLMSGRTSEAIKSHRRAESYRELVAAYERMGSVPRTRELPRETVEKADASRRVLRPRAPRGRDEVEQVSSDAVTRVAEACSPGPHPGPYGGNKREWDDHASTQPATRVAEAGHLGPYPSVGEESSGEGADRTQRVRATLVAELDPEWLPSGSDSEPGSDREQQTEYLVTMGELPSTRDVGTPARGRHPSYTEVNGDEFDWQYPLIEAILEQALSADIDPILVQVAIENSPENSDSLQRLIDHDLMGMFPPIEKPSLRGGPGPPRRAAQTARAKRRESYARIQSLYKSSRSNCARTVLNGHWRTAPPKLSMQTQMAFWRPLLETPSKQETRLPPEGVRPQWAMVCPITLEEVARHLGNMKDGAAGPDNCGRKDLRKLSAVSLACRFNLWLLTGKAPEAFKHGITVLIPKSQDGHEPKDFRPITMGSILCRLYHKILAERVERHYQISGSQKAFRKGDGLAENMYILTNVIEDRKARSQATNIAFLDVSKAFDSVSHESILLAAASAGIPHPLVRYVRSVYTGSTTRLRVDGELGPDIRVRRGVRQGDPLSPVLFNSVVDLALRQIDQEIGVSVATEKLSCLAFADDLVLLATTPRGLQTQFERIELALGESGLDLNAAKSATIRIDVSGKSKRWICNPTAFLLAKDGQVIKAIKVTEDYRYLGNAIGTSRTKGSTVQELQRGIAELSRAPLKPQQRLFILRKNLIPSLYHTAVLGRMYKKSLKFLDQIVRAAVRSWLRLPNDTPLGLFHAHYSDGGLDIPPLLLTVPLLRTKRMGRLVSSQDPIARAVAQLPIFERERKRWSAPLAAYGVSIRDGTGVRKAMGVGLHMSVDGRGLTGSRETGFVNKWMVSGDALMSGHSFVNCVRLKCNLPYTRARAARGRPDKPVACDACRSPETLAHILQSCPRTSKPRVDRHDRANKYLTEVVRRSGFATRVEPAIPTPAGIRYPDLVVWKDGLCVVVDTTIVADHKNPDDAHERKVRYYDQPAIRGWCESISGVAADEVKFSACVLTWRGVPSVRSVRELRTLGVTKSNWLLLSVKALEGGIACYSHFTNATVSFCYLP

SEQ ID NO: 16 - protein, 1023 aa, synthetic construct
MGKDNPKAALWKEQENKAREAYFSLLTTIGRRKKDMAEAKAIKYRGKSNTHFLRPSFMSRKRSSITSMLVDGSDDKDAKRTTDDKVWKDNFNEFYKELYSPKEIEVDVLKDILDKTDISLPPRLLSKLRRRAKTSEIEKIIDTLPAGKAPGPDSLPYGIWGILRDTSPVAFCNLFNACMDRGKIVNSARKANIVLLPKEPDSFACGMYRPISLTNTDYKIIMRVWANRLGPMLNSKIGGHQLGFIPGRDGRENIINEQFLIDYYQHKGRAGAVVFLDLQKAFDRVSHEALMTIMRHHGWPEEFVGFVENVYTNNTAKLIVNGELNEESFNVASGTRQGCPLSPLLFTLIAEMLCQPIINDPEFKGMKVDDGDRKALSAYADDIAINNSCREDIDIMNAHLERFERATGMRVNKKKSEAVLVGGWIRFPPPELLFPCVRKVKYLGCPVGRLTDIDYTCTWEAMEDKLDATFRRWNRAATAPKDRMLLAKTMALSKLWYMASVIPWSIQSLRRIQKTTIRYIWGFKMHKVSMSQLQLPKKNLGLNMWSLVAKVRALNARWGLYYLTNKLSPDLHNLMHSVYNNTRIGRTDTDREPLQASGSLPGTMIKKITGSRIMSYLMDNWSRIVTRCPIFKIGDEVKFAYEDGSIWDGVGTITTEISDSFKYVVEWEENPRQNPKVIANTGTCKAMALYSNDPTAITDTHNTMGIEIDHRVMVLLRTALKKVSVKSTKHGPAFDKVEVNKHLYNGQMLGMGQIDIGKGPKVNKFVERFTEPKLLAAVRANWSSSASSAVQSFRWLLMSHALPVGSRPTPTSACVFSGEEETIEHLFYECKFAEAIWDEVYSNWLKMIQLANFELKVCTPVIMPRRNFWNTVFRGGKHMSFRNQWTIVQGIVTYHIWRTRCAAYYNNKIPPPPKAEVPFIWQHVFLTLQAEADALRDIKWWWIKRSLAMNPHQREVIQDKVLPGIEKDLATLEALQSTLTHTSQRRVSDREDGLSNTVLPYRNRYSNPYWYLSIVNPTLLEKK

SEQ ID NO: 17 - protein, 1031 aa, synthetic construct
MAACLDRPFLPLHAAFAEPRYTTLPPCSMRIATWNVRTMNAESKPEQLAHRLQQYDIDICCITEVRWPYSGIKDVGGWKLAFSGRDDGQLRQGVGVMLSPRAAAAYIDSQPISEGVLLVKLRLKSSTLCVICAYAPTNDYPEDQKDAFFVELQHAVDRVAARNTLVLAGDFNAQVGAEDPQQWHGCLGKFALKRDTLRTSGMAIRLLDFCVTNDLVLRNTFFDHKNIHLATWTGPGDRNANQIDFMVMRRAQARAMLNCRVHRGAELETDHYLLVSSCRLQFSQPRATQRQRKSGYGSELLHDAAVQSTFASMISNESRHFYDMMDMPDTAPEELWQQYKSGMQRCADAVLRKETEPRTPWMSAKTWDHVQRKQDSYKALKHAKSEHEKVIFRQRYRQALNECRKSVKADKRAYWRAKAVALEADFAANRVHTAYKRVGLRDELDRVQSLSAGKLRRIDGTHTSSAKEKADIRKDHFQELLNCHRPVQPLVHKWVQAQQQHILQDLPSDEVPTLPEVESAVNALKNYKAAGVCGISPEMIKYGGRDGLKMLHMLISTVWQKGVVPDDWKRALIVPLFKKGDPTNIDNYRGISLLSLPGKVLAIVLKNRLQQWAEALLMEGQCGFRKGRSCNDAIFSLNGLCELTSKAGKQLHACFIDLSKAYDSVDRPLAWELFQSLGLPPKMLGLIKDLHNNTTCALQTDKDKQDSWFQVSTGFKQGDVNAPLFFNIFLDSICRYIEAKAGELGFNLAYNIDGHLTGRRKPNGSMPCWILLYADDMVIFEKNRERMQAVLATVYQALQDWGMQMSIPKTKYLCYNSAEHCAQPLEIAQHEIEQVSKFKYLGSMQTSDLSVRAEVNNRLASAANAWLKLSKLHVWDDVCISTGIKCTLYKVIVQSTLLYGSETWAFPKQQMHRLDVFQMKCLRKIYKVSLKDRVKNDIILGRCNVAKISNIVSHRRLRWLGHLARMPDERLPKRVLFGYMDGSGVRGKSQKQWVDYVREDLHFAGLSFTWWRKSQDRAVWRAAIECLLQRT

SEQ ID NO: 18 - protein, 1032 aa, synthetic construct
MSNPNKVKKITHRFWAHKFKRKGKGKTKTNKMSNLPRPNFSIEELKKVLARKKLDTAPGPDAIPYSAYRTLNEDNLSAILEEINSKINDTPEEWLEALQWNIFKEGKKEELNNYRPIALCNTIYKIQTLLIKERMEEITTEENLIHPSQHGFTKHRTTSHNIIALKTIIHKDKLEQRETHLLFLDIAGAYDSVPHEALWCTLAKNPSIQPYAMIIQQMYSKATTQIITSVGLTDKIQIERGVRQGDPLSPLLFNLFINEVITKVYKQHRGWRTKNQNYPTLAFADDLVLCANTRRDLQTITKKVIRFLRKNHMNINTKKTIYTSSNRRRRSIHLQHNTKIKEVKKGKAVRYLGAYLSLDQPDKKESDTRIAELWKRVNLITSKKLYPHIMAEAVNALAYSKIVYSFGHTKYKRKALKEIDKKVAHLIRTKTGAYPFHTDKVHAKWREGGWGLLSLHDLYTRMMTGTLFDRILNRPNTISKKIICEALEEIGESNKEIPGSITYQALHAPPTIKQAWKIAREEGLIPINTTLNLLHPETILSAHPLVIDELNQKGISDVTTIKTNLPQSVANYLLGPINNLLPFMRRDQEMQPPQNTIQIENSRVVWTDGSLKKGENSGTAGIFYDLGNPGNKTIHIPHCNSSFEAEAIAIHAALRECPQEENIRIITDSLSVIQAINSEDSPSYVIEGIKKRIQERKGKQSRTEIIHIYSHIKKKKKKSQVWEEKIRDQEIELFPHFRQYRWGNKKADKLTNQEASKQKGIPPYAPEFMIFNKQKLKWEPLRVKDTLKREQRSKIITTTNERDQGRHPSLQQTNRSLSEIALKNPTIQASEANFLIKARSYCLPIPDRKNKPAICPKCGGLETHQHLLLECPNLEETKKQIVKKMKETLTKMAIPHIVANEWFNNEIPTYMWALGYIPKKWAQRMKRMIGGKPLTSAIAIATRITSKLTLKSFKENRNQIRRPNRRANQRNTNPTRNDTDNASDNDNTQVANATNVNVALQIDIRQAILDALEILPDPIIPTTPSLHRTTPQ

SEQ ID NO: 19 - protein, 991 aa, synthetic construct
MASTNLRITTYNCKHFHDSGENFTFIDTLMCDTNFLFLQELCLYENEFEKLLNLSNNCDFTATSAMDEKVHRIGRPFGGTAIIWNSSITGHINKVECDNNRICGLLYIMNNVTMMLLNIYMPCDKYTDDFEFIDVVNTISQLLHKHNPSHVVIGGDMNVDFIRNSPNTRVLSDFITDFNLYTCIDLPDSNVPYTFINHNNNTSRIDHFFVCESLKDAISDCNIVDNHLFSDHVPLNICFNLDVTYIAEVERPFTSKQAWYKATDFDIEKYKKRLDGLLENIIINDSMLYCSDYNCIDHKEELCELYNTVINTCITASDHIPTTSNRIKVKPGWNDNVKQLKEDALSWHHFWKINNRPRVGYVAEMHRISRARYHRAIRHIDRNASKIKSEKIAEAMLSNNSRDMWSEVKKMKGRNSKLTCSIDDCSDSNDIANIFSSKYMELYNSVPYDVDEMKKIESRIMDRIGDCSDDDYNISVRDVIDAVARLKHSKSDGSEGLFSDHFIYGTNRLFVILSLLYSLFLSHGFSPDSMILGTMIPIPKNKKKSLSHSSNYRAIALSSIFSKIFDWIILIKEHSSLCSSDLQFGFKKDTSTTQCSYSMLETIDYYNFNRSNVYVLMLDASKAFDRVNYCKLFNELLKRDISPLVLRLLLYMYTSQCLRVKWGHTLSDCFTVKNGVKQGGVLSPILFAIYTDGMLQKLESTGVGCHMGSHFTGALAYADDLTLLSPSISGLKILIEVCEQYARDFDILFNGNKSQLLFYKGRGCVSCYKDIVVNEQCVKYSNSAVHLGHTISPDDKDCILRNAKANFWKKFNIFMSDFGNLSCHVKSKLFQQYCCSMYGSPLWSLRGSAVQSLCVAWRKALRSLWRVSPRTHCDLITALSFQIPLHSNLAKIFAKFIIKCLCSKNRIVNIISHIAIRNPISCAGNNYRDLLDRNSEVDVKTLLLNWKERADTLENLVRTLHELIEIRDGLKECIGLTFDEITILITDICIH

SEQ ID NO: 20 - protein, 1094 aa, synthetic construct
MVTIYTEFKTDPGAGARVVALRVDAGAKAGYVILRSEGVHGHGYSGSGSRDRALSAAGKIDEPMETLDRKSSFRLPFKILIFESGRREMDGELSPSLDFVNRALDVQESREEEALTLGSEEPTEPLSNGSVYMPASSTERGIADLAEDGQTGKLLIPMPLRTVACPCNQVFCNVYEFEIHMERAHMGIDVKYTCDLCGKHCLRVHGAKIHRSLCRGNTIRPVIPRPWKCEACEEAFRSKSGLSQHKRHRHPALRNLERKAKYVKEPGQAKPLFKATKLWSIEETKRLLELENEFQGNKNINKLIAAQLAGKSNKLVSDRRRTVHKAKTNISQDKGVTAGRNEDRVTGPGMAVSETVTDPEAFWDFVTGARNSGVEGESHQKTLQVLVDLLQEGNVERACSQVSEILADITPVTKPQSKSKKGQGPKNRRKSQAKAEAYRHAQQLFETNKKSLVAELLEGAESTKCPLSVETVYEAYKARFETESPEVDMSHFPPPVNGMDCDNILKPITGEEVYKAVRKTRPDSASGPDKIDVRSIRKWDPRGIKLAAVFNIFLLTGKVPDAVRPNRSILLYKGGETTQVGNWRPLTIGCMVLRLYTKVLAARFMFATPISPCQRGFVSGGSCNENVHLVEGLVRDAKRRNKPIGVCFLDLAKAFDTVSHKHVLAGLTRFGASKHVTRIVEDLYRGASTRFTIPDGTTGEIEMKRGVKQGDPLSPVLFNIALDPLFCLVEKAGVPYELEDGTPVSVAGYADDTMVVSNNKNDLQANINLVEEFCRAAKLKLNAKKSYAYTIRPIAKTYVVNCGDQLRIEAEAITWIEPGDTAKYLGVEQSPWIRKVKDNPTEDLKSWCSKLGRAPLKGRQKLLLLSRHVLPKLKYRLANSDPSKEVLAGLDSVSREYTKRWMNLPACVSSAFLHCSVQDGGVGLPSLATEVPLDKIGSMSRLIGSQDGHVKRLAKAIGIEEQLETTCRRWEIRRPLNKMRCVVNEIRKRRRVEWENLGSQGPRGPYWRRCRASNGWMRRDVLSEGEHTVALQLRTNTYPTREAMSRGRKGTNVMCRRCGQSVETLGHITRQCLAVKCNRIKRHNKVCGILVSAT

SEQ ID NO: 21 - protein, 846 aa, synthetic construct
MTGEDPQECAKCNYNMIDTKQAVDHCARKHHGMSVQWKCRKCERDWSNIRSIAAHYRHCTGRPPSPVATTATSHVCDQCERAFTGLAGLQLHRKRKHPAAYNESLPRPTGKNRLLGADELTRLAGVELDLGTSKRINLVCHDHFQHRSVDAIATIRKSKRYKDILKVVVETRSLVDEQEAGEGAQAPEPFINIVEAQLRTRFDELEGDSSPAVRDTLAYTRTSLAEGNATIGLDLLSEEVYRPRKAPDSTSNPRKRGPDFAPTTRSQKRRQLYKQIQSLYQRNRKQAVGVILDGDPIQTVFPDVDRADEVFRGRFARPSPPDDKVFNLVPGDTMNMGYITSEEISKCRSAMKKKNAPGPDKEVTMDLVLGLELTVLELIFNTWFALGQVPTAFKEARTILLPKSGDATDPNNWRPITICSLIGRLYAKLLAGRLSKCANLSERQKAFVPVDGCGENTALLSSVIAHAHKVKTQVHIAFLDLAKAFDTVPHTSILRALRRKALPEHFIAIVENLYSDANTSISVGDKSTPSIPMTSGVKQGCPLSPVLFNLVLDELIQNIGTIDGLSVGHSKLAILAFADDLVLISGTKDGLASNLRTCEELFNARSMKLNARKSMTLSLVRAHKRKTMLTDETPHWKVYGEFLPAVKHTEEVKYLGVRYTAGGRPMAKLPKLNDWLQKLKSAPLKPQQRIQIVRSTITSRVIHTLRLCRVHAKLLKNLDRKIRTFIKGVLHLPSGTSTDWFYIPIRMGGLGLQEFMSLIPAAKLKLIDGMKKSQDPTVVDAIRQEHWLKEERWCRAVSSLYGNKEQADRGRVERHISSHTGQTQIGFARLPGQCNWLEGGGKHDRS

SEQ ID NO: 22 - protein, 1019 aa, synthetic construct
MKSRQTKTALSTPQLLNGQRVLGISGPRTASTTSWCAGRGGSSKGTAHRTGDGDQRRSGSRGEQVLLRVASLNVGSMTGKGAELVNLMSERRISIACVQETRWKGNSCRELGNGYKLLYAGEVSGRSGVGVVVKGELKESIVDVKRVNSRLMLVKLVWKGIVLNVVSAYAPQAGLGEEEKQQFWRDFDGLIFGVEKEERLMIGGDLNGHVGARAGCYREVHGNEGFGILNKEGEGILETALAHNLFIVNTKFKKKQEHLITYKSQMGISQIDYFLVRRDDVMECKDCKVLPGETLEGHHRILILDMRIKVKEDKKKRVLAEGIKWKKMQEKGGTLKQKLLTEVEWEFDSSAEGMWKKTSVVLKRCCREVLGVYKVGTRYIEKETWWWNEDVSKVVKNKKKAYKKWQESKSDEDYEEYKKTKNIAKRKVAQVKSDKFKDMYNRLETREGEKDVYRLAKERAKKKRDIDSVRCVKDEGGEVLVKNEEIRNRWGRYFSSVMNEGDSGSHCDTSGLGEFEPAEQGVEEITSVEVEKALQKMKRGKAVGPDEIPIEVWRLLGESGIYWLTRLFNKMLKGDTMPEEWRMSYVTPLYKGKGDVQDCNNYRGIKLLSHTMKLWERVIEARLRRFTGINENQFGFMPGRSTTEPIFIVRQLMEKFRGARKSMFVVFVDLEKAYDRVPRRVLWDVLMRKGVGKRYIDLIRDMYRESKTCVKTVGGLSDGFGVGVGVHQGSSLSPYLFVLVMDELLKGNVPDVPWCMLFADDMILIGETVEEVEEKLGRVMRALESNGMKVNRSKTEYVFCDWSENGLAKEVTVQDWRVGRVGQYKYLGSIVEEDGGIDKETKARIQAGWNKLREVSGVLFDKRIARRLRGKVYATVVRPVMLYGAECWPVTKIQEHTFGVAEMRMLRSMYGVTIKDRVENEYIREGLGVENIKQKMRESRLRWYGHVSRKGEEEVVSRVRDLRVGGKRRRGRPKMSWDSVLAKDMEYCGLRHDMVHDKTEWRFAIKMPTLAKLGQRQGR

SEQ ID NO: 23 - protein, 955 aa, synthetic construct
MAANLVTISYNLHGYNQGCPGINELILKLRPDIFMVQEHWLSPDNLSKLDNISDCYFVFGSSAMLDCVSSGPLVGRPFGGTAFLINKKHVSATSNVESSDRFTVIRIYNWLLINVYLPCVGTPHRDELYSDILLQLQNIISANSDCSCLIGGDFNVDLDGNSNISLLVNEFMCHNNMHRCDVLFPVSNRNTFMNEATNTGSAIDYMLSSTSDKTIAFNILDLDINLSDHSPIMAVCALDMSFLPLSTQCESCSPDDVTHLRWDHAPLCMYYEHTRLLLQPVLTNLDALLESSDSADDVFCVGSADQIYCNVVNILCESANLFVPKHKKNFYRFWWSQELDMLKSKAIESSRAWKGAGKPKHGSIFSQYKQDKLLYKKRIREECFNETKSYTNDLHDALLCKSGQAFWKTWKSKFESKSTNVLQVDGTADSGIITDKFGKYFEANCSPFSPARNEEFKKKYTELRSNYSGSPITDDQVFDVELISRLVSNMDKGKAAGLDELSSEHLKFSHPILICILTKLFNLFIAKGHIPTSFGSSYTVPIPKCDGRTRALSVDDFRGISISPVLSKLFELAILDRFSTYFTTSDHQFGFKKHLSCRNAIYCVRNVVESFVSNGSTVNVCALDLSKAFDRMNHYALFIKLIERNFPTKLLNVLETWFCASITCVKWGRNVSSFFSLHAGVRQGGVLSPILFSVFIDDIVTKVKAANVGCYMSTICASIFLYADDVLLVAPSVAGLQSLLNVCENELINLDMRINVKKSMCVRFGQRFDAPCVELVSIHGGSLKWVSSCRYLGVYFVSGRTFKCCFHSAKSQFYRAFNSLFSRVGRAASEEIILVLINAKCMPILMYALEACPLLSRDKQSFQFTITRLFMKLFRTGSPAVVEECERHFNFLPFKQQLDIRTAKFLQSFMASENSLCLLFESNARLQLSSIYSNYGHTIRTVCQLVNKIHEQYFC

SEQ ID NO: 24 - protein, 917 aa, synthetic construct
MGSSNFTGARLTVISYNLHGLNQGLTGIRELMTQINPDVIMVQEHWLTSDNLFKLSDISDNYFVFGSSAMDSRISAGPLVGRPFGGTAILIKNDFVNVTVSVATCERFTAIKLDKWLLVNVYLPCSGTDHRLLIYTDVLCEVQALISTHSDCECLVGGDFNSDLKDSKSHAINHMINDFILTNNLCRCDLVFPVAIKHTYINESLNCSSTIDYMLTSNPGCTVGFNILDLDLNLSDHLPIMAILALNAHIPSAASMDVSVDVTHLRWDHAQLHEYYDLTRLGLDPVLCELTVLINNFRCTPDTAVYGNIDALYNRVVNVLNQCADHCVPKQRKNFFKFWWSQELAELKEKAIASCRMWKDAGRPRNGPINAKYRQDKLLYKKRIRKERAEETSSFTNDLHDALLYKCGSDFWKVWNSKFENKSSKIIQVGGTADSNVITSNFAKHFEQVCQPFSSARNAEIKAQYDDIRANYNTIPVFSDIEIFDSELLGSLLAKMKNGKAAGLDGITSEHLKNCHPSVVVILCKLFNLFIATGHIPSSFAASYTVPIPKCDGRSKSLDVDDFRGISISPVISKLFELCVLERYSDYFDTSDHQFGFKKNLSCCHVIYSVRTVIENFISNGSTVNLCALDLSKAFDRMNHYALFIKLMERKFPVEVLKVLEQWFSMSITCVKWGGQMSNFFSLVAGVRQGGVLSPVLFSIFIDGIVNKAKSANVGCYLSNICVSIYLYADDILLIAPTVTGLQTLLTMCEQELFELDMKLNVAKSVCIRFGEQFDAVCSDILSVQGGKLQWVYNCRYLGVYFTSGRVFRCCFHNAKCSFFRAFNAIFSKVGRFASEHVILSLLRTKCLPILLYGIEACPMLKRDKHSLDFTLTRIFMKLFCTATPAIVAECHVQFNFLPLKYQVDIRTASFLFRFIS

SEQ ID NO: 25 - protein, 973 aa, synthetic construct
MMAALSNSTHLIGNSNCTGARLVVISYNLHGLNQGMTGIRELIRHVNPDVIMVQEHWLTSDNLFKLSDISDKYFVFGSSAMDARVSAGPLVGRPFGGTAMLIKNSFVNITVGIATCERFTAIKLANWLLVNVYLPCSGTDQRLLIYSDVLCEVQSLITAHSDCDYLVGGDFNSDLTDAKSHASNHMINDFIVTNNLCRCDVVFPVATKYTYINESLDCSSTIDYMLTSNCDSTIAFNIVDLDLNLSDHLPILVVLALNADLSNATCNANPSVDVTHLRWDHAQINEYYDLTRLGLDPVLCELTVVINNLHCAPESMVSDQIDALYERVVNVLSQCADQCVPKQIKNFFKFWWSQELAELKEKAIASCRLWKEAGRPRNGPINVKYRQDKLLYKKRIREERAEESSSFTNDLHEALLRKSGSDFWKVWNSKFENKSSKIIQVGGTADSNVIVNSFAKHFEEVCQPFTAARNADLKAQYDDVRVNYSTPPVFSDAEIFDAELVGNLLVKMKNGKAAGLDGITSEHLKHSHPSVVVILCKLFNLFIATGHIPISFAASYTVPIPKCDGRSKSLEVNDFRGISISPVISKLFELCVLERYRDYFDTSDHQFGFKKTLSCSHVIYSVRTVIENFISNGSTVNLCALDLSKAFDRMNHYALFIKLIKRKFPVEILQILEHWFCGSKTCVRWGGQVSYFFAMVAGVRQGGVLSPVLFSIFIDDIVNKVKLANVGCYLSNICVSIFLYADDILLIAPTVTGLQTLLTVCEQELLELDMKLNVDKSVCIRFGDQFDASCTDIMSVQGGRLLWVDSCRYLGVYFTSGRVFRCCFHNAKCSFFRSFNAIFSKVGRFASEQVILSLLRTKCLPILLYGLEACPVLKSDKHSLNFTLTRLFMKLFRTGSPAVVAECQLQFNFLPLQYQVDIRTAKFLFRFLNSANSLCILLSVHAKAQLTSILSSYGEDVSSIYDLHVAISDILVA

SEQ ID NO: 26 - protein, 968 aa, synthetic construct
MASEQINLRDCDSAEKLIVISYNLHGLNQGRPGITELISLLSPDAIMIQEHWLTPDNMYKLDQLSDNYLVFGSSAMNDCVLSGPLIGRPFGGTAIIIKKSLASATKNIISSDRYNVVKIANWLLFNVYMPCVGTDYREYLYVEILSEFDSLLAANPNCSCLVGGDFNTCLDNPVNVSVTINTFIANNMLHRCDILFPSNNKFTFFNESTHSGTAIDYMLASDPNDIIAFNVLDMDINLSDHHPIMAVCACPKLSIDPSSCQTNLPEIQHFRWDHAQLDNYYEHTRRLLQPVYDELNVLACCHVSLDAMIVADKIDSIYNRFVTALCVSAEKFIPKHRKNFYKFWWSQELDALKEKSIASCRKWKEAGKPRNGPIQAQYKKDKLLYKKCIKEEQAAETCSFTNDLHDALLCKSNQDFWKTWRSKFSNNSNNIIQVDGIADGAAIANNFANFFESNSKPFSDSRNAELKAQYTELRADYCGCPVTDNELFDVELIGKLITEMKNNKAAGLDELTCEHLKFSHPIAICILTQLFNLFIALSHIPSSFGASYTVPIPKCDGRTRAMSVDDFRGISISPVISKVFEMAVLDRFAPYFRTSDHQFGFKRNIGCREAIYSVRNVIETFISNGSTINVCTLDLSKAFDRMNHYALLIKLIERKLPFQLLIVLENWFLISITCVKWNGHVSHFFRLLLGVRQGGVLSPLLFAIFVDDIVIRVKSTHAGCYISLVCCCIFLYADDILLVSPTVSGLQILLNACENELTELDMKINVKKSMCIRFGKRFDVHCAELVSVQGGPILWVDSCRYLGVYFLSGRSFRCSLDDAKSRFFRAFNAIYSKVGHFASETVILNLIRTKCLPILLYATEACPLLSRQKHSLEFTVTRIFMRIFHTGSMDIVKQCQCNFGFLSVSYQLSVRTARFLQKLVASENSLCLLFSRTASDQLAKIFSFFDEDIKTACQLNNFLYELLSVSFN

SEQ ID NO: 27 - protein, 968 aa, synthetic construct
MASEQINLRDCDSAEKLIVISYNLHGLNQGRPGITELISLLSPDAIMIQEHWLTPDNMYKLDQLSDNYLVFGSSAMNDCVLSGPLIGRPFGGTAIIIKKSLASVTKNIISSDRYNVVKIANWLLFNVYMPCVGTDYREYLYVEILSEFDSLLAANPNCSCLVGGDFNTCLDNPVNVSVTINTFIANNMLHRCDILFPSSNKFTFFNESTHSGTAIDYMLASDPNDIIAFNVLDMDINLSDHHPIMAVCACTKLSIDPSSCQTNLPEIQHFRWDHAQLDNYYEHTRRLLQPVYDELNVLACCHVSLDAMIVADKIDSIYNRFVTALCVSAEKFIPKHRKNFYKFWWSQELDALKEKSIASCRKWKEAGKPRNGPIQAQYKKDKLLYKKCIKEEQAAETCSFTNDLHDALLCKSNQDFWKTWRSKFSNNSNNIIQVDGIADGAAIANNFANFFESNSKPFSDSRNAELKAQYTELRADYCGCPVTDNELFDVELIGKLITEMKNNKAAGLDELTCEHLKFSHPIAICILTQLFNLFIALSHIPSSFGASYTVPIPKCDGRTRAMSVDDFRGISISPVISKVFEMAVLDRFAPYFRTSDHQFGFKRNIGCREAIYSVRNVIETFISNGSTINVCTLDLSKAFDRMNHYALLIKLIERKLPFQLLIVLENWFLISITCVKWNGHVSHFFRLLLGVRQGGVLSPLLFAIFVDDIVIRVKSTHAGCYISLVCCCIFLYADDILLVSPTVSGLQILLNACENELTELDMKINVKKSMCIRFGKRFDVHCAELVSVQGGPILWVDSCRYLGVYFLSGRSFRCSLDDAKSRFFRAFNAIYSKVGHFASETVILNLIRTKCLPILLYATEACPLLSRQKHSLEFTVTRIFMRIFHTGSMDIVKQCQCNFGFLSVSYQLSVRTARFLQKLVASENSLCLLFSRTASDQLAKIFSFFDEDIKTACQLNNFLYELLSVSFN

SEQ ID NO: 28 - protein, 974 aa, synthetic construct
MATKYSNCASDNTCNTPVHRLVVVSYNLHGYNQGCPGILELMSKITPDVIMVQEHWLTPDNLHKLNDLSNDYFVFGSSAMSERVASGPLYGRPFGDTAIFINNKYASVTTNLVSRDRYTAIKIANFMLITVYMPSVGTAQRDFLCSELLAELDAVLSSNSNSNSNCQFLIGGDFNTNLDSNAKVSLAINEFISNNSIYRCDEIFDVADSYTFCNETAHCFSTIDYMLTSCAQDIIAFNVVDMDINLSDHNPILSVCSCCIDTRSVNKNEKSADLYAEFFRWDHAPVDKYYDQTRVLMQPVLDEISSLVINSAYMDKESIAIASDSIYDNLVDAMRSSANLFIPKHRKNFFKFWWSQELDELKEKAIVSCREWKSAGKPKSGVTFQQYLKDKALYKKSIRYEQQREKSCYTNDLHEALLHKNGQDFWKVWKSKFEIGSTNTIVDGLADSAAIANKFAQHLESNCRPFNSERSAALKIQYIDQRAQYCGTPITDCQWFDVELIDRLTREMKNGKAAGLDEIFCEHLKLSHPIVVCILSKLFNLFLSTGHIPASFGVSYTVPIPKCDGRTRALTVDDFRGISISPVISKLFEMAVLDRFSHYFVTSDYQFGFKKHLSCSNAIFCVRNVIENFVSRGTTVNVCTLDLSKAFDRMNHYALLVKLMSRKIPDLLLCIFELWFSISVTCVKWDNHFSHFFLLIVGVRQGGVLSPVLFAIFIDSIVDKVKSTNVGCYISLICCCIFLYADDIILIAPSIHALQTLLNACEDELFVLDMCVNVKKSACIRFGTRHDAQCCEIISSFGGSIKWVESCRYLGVFLVSGRNYSCSFHDAKSRFFRAFNAVFGKIGRIASEEVVLSLLKAKCLPILLFATEACPLLSRQKTSFDFTLTRIFMKLFNTGSAVIAKECQNLFNFLPIRMQLSIRTARFLQKFAACENNLCSLFADIAVKQLNVLFSEYNVKTACQLANAIYRKLSETLN

SEQ ID NO: 29 - protein, 973 aa, synthetic construct
MMAALSNSTHLIGNSNCTGARLVVISYNLHGLNQGMTGIRELIRHVNPDVIMVQEHWLTSDNLFKLSDISDKYFVFGSSAMDARVSAGPLVGRPFGGTAMLIKNSFVNITVGIATCERFTAIKLANWLLVNVYLPCSGTDQRLLIYSDVLCEVQSLISAHSDCDYLVGGDFNSDLTDAKSHASNHMINDFIVTNNLCRCDVVFPVATKYTYINESLDCSSTIDYMLTSNCDSTIAFNIVDLDLNLSDHLPILVVLALNADLSNATCNANPSVDVTHLRWDHAQINEYYDLTRLGLDPVLCEVTVVINNFHCAPESMVADQIDALYERVVNVLSQCADQCVPKQRKNFFKFWWSQELAELKEKAIASCRLWKEAGRPRNGPINVKYRQDKLLYKKRIREERAEESSSFTNDLHEALLRKSGSDFWKVWNSKFENKSSKIIQVGGTADSNVIVNNFAKHFEEVCQPFTAARNADLKAQYDDVRANYSTPPVFSDAEIFDAELVGNLLVKMKNGKAAGLDGITSEHLKHSHPSVVVILCKLFNLFIATGHIPISFAASYTVPIPKCDGRSKSLEVNDFRGISISPVISKLFELCVLERYRDYFDTSDHQFGFKKTLSCSHVIYSVRTVIENFISNGSTVNLCALDLSKAFDRMNHYALFIKLIKRKFPVEILQILEHWFCGSKTCVRWGGQVSYFFAMVAGVRQGGVLSPVLFSIFIDDIVNKVKLANVGCYLSNSCVSIFLYADDILLIAPTVTGLQTLLTVCEQELLELDMKLNVDKSVCIRFGDQFDASCTDIMSVQGGRLLWVDSCRYLGVYFTSGRVFRCCFHNAKCSFFRSFNAIFSKVGRFASEQVILSLLRTKCLPILLYGLEACPVLKSDKHSLNFTLTRLFMKLFRTGSPAVVAECQLQFNFLPLQYQVDIRTAKFLFRFLNSANSLCILLSVHAKAQLTSILSSYGEDVSSIYDLHVAISDILVA

SEQ ID NO: 30 - DNA, 1827 bp, synthetic construct
  source 1..1827: mol_type = other DNA
atggactacaaagacgatgacgacaagtacccctatgatgtacctgattatgctgccagcaatttcacacagttcgtccttgtagacaacggcggcaccggggatgttacagtggccccgagcaatttcgcaaacggcgtagccgagtggatctcctctaatagcagaagccaggcttataaggttacatgctctgtaaggcagtcttccgcacaaaatagaaagtacacaatcaaggtcgaagtgcccaaggttgctacacagaccgttggtggagaggagttgccagtggctgggtggcgctcctacctgaatatggagttaacaatccccattttcgctaccaattcagactgtgaactcattgtcaaagctatgcaaggtcttcttaaggatggtaacccaattccaagtgcaattgctgctaattcaggcatttattctggcggcagcagcggcggctcaagcggaagtgaaacacctggaacttccgaaagcgctacgcctgaatcttctggtggatcttctggcggatcttccgcatgcatggacacctcaagccttatggaacagatattgagtaaagaaaatctcaacgctgcctacctccaagttgtgagaaataagggtgctgccggagtagacgggatgaatgtcgaagaactgggtgcgtacctctccgagaacggcgagaacatacgagaacagcttcgcacaaggaaatacaaaccccagcccgtgagacgagtcgagatacccaagcctgatggaggggttcggaatttgggtgtacctactgtcgtggatcggtttgtacagcaagccgtggcacaggtcctcacacctatcttcgaggagcaattccacgaccatagctacggattcagaccaaaccgctgtgctcaacaagcagtcctgaaagccttagaaatgatgaatgacggccacagttggatcgttgacattgatctcgcgaaattcttcgatacggtcgaccacgacaagttgatgacgatcttcggcagaacaatcaaagatggtgacgtaatcagcgtagtgagaaaattcttggtatctggcgttatgatcgatgatgagtatgaggatacgatcgtggggaccccacagggtggaaacatatcaccactcttggccaatatcatgttaaatgagctcgataacgaactggaggctcgtggacttaacttcgtgcgatatgccgacgaccttataattatggtcggctctaaacaggccgccgatagagtgatgaagtctgtgaccagattcattgaggaaaagctcggactgaaggtgaatgctgaaaaaagcaaggtcgataagcccaagggaattaagtatctggggttcggcttctacttcgacacctttgccaaggcatacaaagctaggccccatccaaaagctgttaccaagtttaaagcccagatgaagaagctgacatgtcgaagttggggagtgagcaatgcttacaaagtgcaaaagctgaatcagctgatacgtgggtggatcaactattttaaaataggcaatatgaagagattatgccaacggctggactctaatattcgttatcggttgcgcatgtgtatctggaaacattggaaaacacctaaaaatcgtgccaagaatatgatgaagctcggactgcccgcctgggccgcctggagatcagcttatatccacggttatgctcgggtctgtcggtccagagacgtccacagaacaattacctcagagcgactcaaacaattcggcttgatgtcaatgaccgactactacaccgagcgaagcgtggcctgttga

SEQ ID NO: 31 - DNA, 1830 bp, synthetic construct
  source 1..1830: mol_type = other DNA
atggactacaaagacgatgacgacaagtacccctatgatgtacctgattatgctgccagcaatttcacacagttcgtccttgtagacaacggcggcaccggggatgttacagtggccccgagcaatttcgcaaacggcgtagccgagtggatctcctctaatagcagaagccaggcttataaggttacatgctctgtaaggcagtcttccgcacaaaatagaaagtacacaatcaaggtcgaagtgcccaaggttgctacacagaccgttggtggagaggagttgccagtggctgggtggcgctcctacctgaatatggagttaacaatccccattttcgctaccaattcagactgtgaactcattgtcaaagctatgcaaggtcttcttaaggatggtaacccaattccaagtgcaattgctgctaattcaggcatttattctggcggcagcagcggcggctcaagcggaagtgaaacacctggaacttccgaaagcgctacgcctgaatcttctggtggatcttctggcggatcttccgcatgcatggacaccagctctctcatggaacaaattttatctaaagacaacttgaacgcagcctaccttcaagtggtgcgtaacaaaggtgcagcgggagtggacggaatgacagtagaggaactgggggcatacctctctgagaacggcgagtctattcgggaacagttgcggacccgcaagtaccgaccccagccagtacggagagccgagatcagtaagccagacggtggtgtacgtaaactcggagtccctaccgttgttgatcgattcgtgcagcaagccgtggcccaggttctcacccccattttcgaggaacaattccatgatcacagttatggatttcgacccaacagatgtgcccagcaggccgtgcttaaggccctggaaatgatgaacgacggacactcttggatcgtggatatcgacctcgccaagtttttcgacaccgtggatcatgataagctgatgaccatcttcggcagaacaataaaagacggggacgtgatatctgtcgtccgcaaatttctcgtgagcggcgtgatgatcgacgatgagtatgaggacaccattgttggaactccacaaggggggaatataagccctttgttagctaatatcatgctgaatgagctcgataaagaactggaagctcgcgggttggacttcgtaaggtacgcagacgacctcattatcatggtgggatcacggcaggctgcagacagggtgatgaagtccgtgactcggttcattgaggagaggttaggcctgaaagtaaatgccgaaaagtcaaaagtagataagccaaaagggattaagtatctgggctttggattttacttcgacagcttcgccaaggcgtataaggcgcgtcctcacccgaaagcagtcgctaaattcaaagctcagatgaaaaaacttacatgtcggagttggggagtttctaactcttataaggtgcttaaattgaatcagctgattagaggctggataaactacttccggatagggagcatgatagaactttgtaaacgcttagacgaaaacattaggtttcgtctccgtatgtgtatttggaagcactggaagacccccaaaaacagagccaagctgttgatgcttctggatgtccctcgttgggccgcctataagatcgcatatagcggcaaccgatacgcgcggatcacacacaacggctgggtgcacaaagcaatatcaaataaaaggttggccgcgttcggtttgattagcatggaagattactatgccaagcgccgggtggcctgttga

SEQ ID NO: 32 - DNA, 1830 bp, synthetic construct
  source 1..1830: mol_type = other DNA
atggactacaaagacgatgacgacaagtacccctatgatgtacctgattatgctgccagcaatttcacacagttcgtccttgtagacaacggcggcaccggggatgttacagtggccccgagcaatttcgcaaacggcgtagccgagtggatctcctctaatagcagaagccaggcttataaggttacatgctctgtaaggcagtcttccgcacaaaatagaaagtacacaatcaaggtcgaagtgcccaaggttgctacacagaccgttggtggagaggagttgccagtggctgggtggcgctcctacctgaatatggagttaacaatccccattttcgctaccaattcagactgtgaactcattgtcaaagctatgcaaggtcttcttaaggatggtaacccaattccaagtgcaattgctgctaattcaggcatttattctggcggcagcagcggcggctcaagcggaagtgaaacacctggaacttccgaaagcgctacgcctgaatcttctggtggatcttctggcggatcttccgcatgcatggatacttcatctctcatggagcagatcctgtcaaaggataatttaaatgccgcctacctgcaagtcgtccgaaacaaaggggctgccggagtcgatggcatgaccgtggaggaacttggtacgtatctgagtgagaatggcgaatcaattagggaacagctcagaacccgaaaatataaaccacaaccagtacgacgagtggaaataccaaaacctgatggcgggatcaggaatttgggtgttccaacggtcgtggacaggtttgttcagcaagccgtcgctcaagtgctcaccccaatatttgaggaacagtttcacgatcactcctatggttttagaccaaatcgctgtgcccagcaggcagtcctgaaagctctggaaatgatgaatgatgggcatgactggattgttgatatcgatcttgccaaatttttcgatacggtagatcacgataagctcatgaccattttcgggcggaccattaaagatggcgacgtgatttctgtggttcggaagtttttggtgtctggcgttatgatagatgacgaatacgaggatacaatcgtcggaactccacaaggaggcaatattagcccacctttagctaatattatgcttaatgagctcgacaaagaattggaggctcgtggactggactttgtgaggtacgcagatgacctcattattatggtcggctctcgccaggccgctgaccgtgtgatgaagtctgtcacacgttttattgaagagagactgggcctgaaagttaacgccgaaaaaagcaaggtggacaagcctaagggcattaagtatttaggctttggattttatttcgattcttttgctaaagcctataaagctcggccacaccaaaaggctgtcgcaaaatttatggcacagatgaagaaactgacctgtcggagctggggcgtgtctaatgcttacaaagtccaaaagttaaatcagctgattagagggtggattaactactttaagatcggatcaatgaaaggtctctgcgagagattagattgtaacattaggtataggcttcggatgtgtatctggaagcactggaaaaccccgcagaaccgagcaaaatacctgatgcaattggggataggccggaaatacgcttggagcaccgcctatacaggtgcccggatcgcttacgtctgtcagaggggtgcaatgaatatggctataacaaaggaacgcttaacccgcttcggcttggtatcaatggcagattattatgcaaagcggcgggtaacatgctga

SEQ ID NO: 33 - DNA, 683 bp, synthetic construct
  source 1..683: mol_type = other DNA
atggtatttactctcgaagactttgtcggtgattggcggcaaactgctgggtataatttggatcaggtgctggagcaaggcggcgtcagcagcctgttccaaaacttgggagtctcagtgacgccaattcagcggatcgttctttccggggagaacggattgaaaattgatatacacgtaattattccatacgagggcctctccggtgatcagatgggtcaaattgagaagatattcaaagttgtttatcccgtagacgaccaccatttcaaagtcattctccattacggtacgttagtcattgatggcgtcacccctaatatgatagattactttggccgtccctacgagggaattgctgtgtttgatgggaagaaaattacagtgaccggaactctttggaatgggaataagatcattgatgaaagacttataaatcctgatgggagtctcctctttagagtgacaattaatggggtaacaggatggagactctgtgagcggatcttggcttagcccaaacccaaacccaaacctttagagctaggccaacatgaggattacccatgtctgcagggcctagcaagttaaaataaggctagtccgttatcaacttggccaggactgaggattacccagtctatctgcagggccaagtaaaaaaaaaaggaagggaaaagggg

SEQ ID NO: 34 - DNA, 20 bp, synthetic construct
  source 1..20: mol_type = other DNA
ggtttgggtttgggtttggg

SEQ ID NO: 35 - DNA, 20 bp, synthetic construct
  source 1..20: mol_type = other DNA
ggtttgggtttgggtttggg

SEQ ID NO: 36 - DNA, 20 bp, synthetic construct
  source 1..20: mol_type = other DNA
atcctgatgggagtctcctc

SEQ ID NO: 37 - DNA, 24 bp, synthetic construct
  source 1..24: mol_type = other DNA
gggagaatggtatttactctcgaa

SEQ ID NO: 38 - DNA, 100 bp, synthetic construct
  source 1..100: mol_type = other DNA
ggtttgggtttgggtttgggctaagccaagatccgctcacagagtctccatcctgttaccccattaattgtcactctaaagaggagactcccatcaggat

SEQ ID NO: 39 - DNA, 542 bp, synthetic construct
  source 1..542: mol_type = other DNA
ggtttgggtttgggtttgggctaagccaagatccgctcacagagtctccatcctgttaccccattaattgtcactctaaagaggagactcccatcaggatttataagtctttcatcaatgatcttattcccattccaaagagttccggtcactgtaattttcttcccatcaaacacagcaattccctcgtagggacggccaaagtaatctatcatattaggggtgacgccatcaatgactaacgtaccgtaatggagaatgactttgaaatggtggtcgtctacgggataaacaactttgaatatcttctcaatttgacccatctgatcaccggagaggccctcgtatggaataattacgtgtatatcaattttcaatccgttctccccggaaagaacgatccgctgaattggcgtcactgagactcccaagttttggaacaggctgctgacgccgccttgctccagcacctgatccaaattatacccagcagtttgccgccaatcaccgacaaagtcttcgagagtaaataccattctccc

SEQ ID NO: 40 - DNA, 1827 bp, synthetic construct
  source 1..1827: mol_type = other DNA
atggactacaaagacgatgacgacaagtacccctatgatgtacctgattatgctgccagcaatttcacacagttcgtccttgtagacaacggcggcaccggggatgttacagtggccccgagcaatttcgcaaacggcgtagccgagtggatctcctctaatagcagaagccaggcttataaggttacatgctctgtaaggcagtcttccgcacaaaatagaaagtacacaatcaaggtcgaagtgcccaaggttgctacacagaccgttggtggagaggagttgccagtggctgggtggcgctcctacctgaatatggagttaacaatccccattttcgctaccaattcagactgtgaactcattgtcaaagctatgcaaggtcttcttaaggatggtaacccaattccaagtgcaattgctgctaattcaggcatttattctggcggcagcagcggcggctcaagcggaagtgaaacacctggaacttccgaaagcgctacgcctgaatcttctggtggatcttctggcggatcttccgcatgcatggacacatcatccctcatggaacagatcctgtccaaagaaaatctgaatgaggcttatctgcaagtggtccgaaataaaggagcagcaggtgtggacggaatgagcgtggaagaactggggccttacctttctgaaaacggcgaaaatataagggagcagatgcggacacgcaaatacaaaccacagcccgttaggcgggtggagattcctaagcccgatggtggggtccgcaatctcggtgtacccacagtcgttgatagattcgtgcagcaagctgtagcccaggtgttgtcaccaatattcgaagagcaattccacgaccattcatacgggttcaggcctaatagatgtgcccagcaggcggtcctgaaggccctggagatgatgaatgacgggcacaactggattgtggatatagacctggcaaagtttttcgataccgttgaccacgacaagttaatgaccattttcgggagaactattaaagacggagacgtcataagccttgtccggaaatttctggtgagcggtgttatgatagacgatgaatacgaggacaccattgtgggcactccacagggaggaaatatctctcccctgttggctaatatcatgcttaatgagttggacaaagagttagaagccagagggcttgattttgtccggtatgccgacgatctgattattatggtgggctcaaggcaggcagcagaacgggttatgaaaagcgtgacccggttcattgagaataaacttggtctgaaggtgaatgcagagaagagcagagtagataaaccaaagggaattaagtaccttggttttggcttctacttcgacagctttgcaaaaggttacaaggcaagaccccatatgaaggccgtcgagaaattcaaagagcagatgaagaaactcacctgtcgatcttggggagtgtccaatacatacaaagtaaagaaattgaaccaactgatcagaggctggataaactatttcaaaataggctcaatgaaaaacctgtgcagaaaattggacgctcatattaggtttagactgagaatgtgcatttggaagcagtggaaaacccctaagaacagggaaaaaaacttgatcaagttagggttgcctcgttatgccgcccacgggatctcatacgccaagggatatgcccgggtctgtcgatcttggaatctgcacatctcaatatcaaaagagcggctggcaaagttcggcctgatatccatggaggattattacgcagaacgaagggttacctgctga

SEQ ID NO: 41 - DNA, 1938 bp, synthetic construct
  source 1..1938: mol_type = other DNA
atggactacaaagacgatgacgacaagtacccctatgatgtacctgattatgctgccagcaatttcacacagttcgtccttgtagacaacggcggcaccggggatgttacagtggccccgagcaatttcgcaaacggcgtagccgagtggatctcctctaatagcagaagccaggcttataaggttacatgctctgtaaggcagtcttccgcacaaaatagaaagtacacaatcaaggtcgaagtgcccaaggttgctacacagaccgttggtggagaggagttgccagtggctgggtggcgctcctacctgaatatggagttaacaatccccattttcgctaccaattcagactgtgaactcattgtcaaagctatgcaaggtcttcttaaggatggtaacccaattccaagtgcaattgctgctaattcaggcatttattctggcggcagcagcggcggctcaagcggaagtgaaacacctggaacttccgaaagcgctacgcctgaatcttctggtggatcttctggcggatcttccgcatgcatgggaaccgaaaaccgagagagctgttctcagcgcgacagtgctgaaagaaaaggctatgtgcgggcccaccgctccttcaaccgtatctggaaggaacgggattccgctgaacccgacattctcggtaaaatcctggaaaaagacaacctgaacagagcatataagcgtgtaaaagccaataagggcgcccccggggtggacgggatgaccatcgaggcaacattgccatggcttaaggagcacaatcacgagctggtggaacgcatacggaagggtaaatacacaccttctcccgtgcgacgtgtggagattcccaagccagacggaggcattcgtaaattaggcataccaacgattatcgaccggattattcagcaggcaatgctgcagcccctcctgcccatttatgagccgcttttcagtgatgacagcttcggatatcgtcccggacgaggagccaaagacgcgatttttcggattaaagagtatattgagcagggctacacgcgtgccgtggtgcttgacctgtccaaatactttgacacactgaaccacactattctcctcaatctgctgagaaggcaggtcaaggacgaaagagtgattcagatggtcaagcgttacctcaaatctggtgttatggaaaacggggtggttgccgaaactgaagaggggtctccccagggcgggaatttgtcccccctgttagcaaatgtgtacctcaacgaatttgattgggagttccacagaaggggcgtcccatgcatacgctatgctgacgacattgtgctcctggcgaaatctgagcgagccgccgagaggttactcgaatcatccgctaagtacctcgaggagactctcaagttaaaggtgaatcgcgagaaatcccggacggtttctgtatttgccatcagaaacttcaaattccttggattttgttttggtaagaacggcaagggaatttacattcgtatccatggcaaaagctggaagaaggccaaagataaattacgacagctcaccagccggagcaggtgcgggtcaatcgtgcgtacaatggagaagattaaggtctacatgaggggctggcttaactactacgggatcgcagatatgaagaataatatggaaagcttgaatggttggctgtacagaaggattagaatgtgtatctggaaacaatggaaactgcccaagacccgtaagcgaaagcttgccggactgggggtcgatagccattatgctgccaccattgcctatgatagaaagggctactggtttaacgctggcaataaggcagtgaactgggccctgagcaaagaacgtctcacaaactgggggttgtatgacctggcaactgcatatcaaagcgtccacgtgaactactga

SEQ ID NO: 42 - DNA, 1827 bp, synthetic construct
  source 1..1827: mol_type = other DNA
atggactacaaagacgatgacgacaagtacccctatgatgtacctgattatgctgccagcaatttcacacagttcgtccttgtagacaacggcggcaccggggatgttacagtggccccgagcaatttcgcaaacggcgtagccgagtggatctcctctaatagcagaagccaggcttataaggttacatgctctgtaaggcagtcttccgcacaaaatagaaagtacacaatcaaggtcgaagtgcccaaggttgctacacagaccgttggtggagaggagttgccagtggctgggtggcgctcctacctgaatatggagttaacaatccccattttcgctaccaattcagactgtgaactcattgtcaaagctatgcaaggtcttcttaaggatggtaacccaattccaagtgcaattgctgctaattcaggcatttattctggcggcagcagcggcggctcaagcggaagtgaaacacctggaacttccgaaagcgctacgcctgaatcttctggtggatcttctggcggatcttccgcatgcatgaaacttattgaaacgatcctgttttctgaaaacgtgattaaagcacagagtagagttctctctaataaaggaggcgcaggcattgacgggatgcacgtcgacgaactggcagagtatatgagggcaaattgggacggaattaaagaaagtatattggtacgtaagtataaccctgctcccgtaaggcgcgtagagattccaaaagtgaatggaggcgtaagaaagctcgggattcccacggtgcttgatcggactattcagcaggcaatagtgcaggttctttctcctatatttgaaaatgagtttcaagaaaattcttacgggtttaggccatgcaggtcctgtgagcaggctattcttaagctgctggaataccttaacgaaggctacgagtggattgtggacatagacttagaaaaattttttgataacgtcccacaagataaacttatgtcctacgtagggagagttatccgtgaccctgacaccgagagcctcatccggaaatacctgaaaagtggggttatggagaatggcatctacgaggctacggaagaagggaccccccagggcgggaatctgagtccgcttctgtccaatatcatgctgaacgagttagataaggagctggtcaatcgaggactccattacgttaggtacgcggatgattgcgtcattgcagtcgggtctgaagcctctgctaaacgagtgatgagaagtgttacgacgtggattgaacgagagttgggactcaaggttaatgcgagcaagagccatatttgccggcccacgaaacttaaatacctgggattcgggttctatcggaaccctcagaatcgccagtggcagagtaggcctcatgaaagttctgtgagcaaatttgtgagatccctgaaacggctgtgtaaaaggagctggtctgtgagtatgaccgatcggattacgcggctcaactacgtcacccgtggctggattaattatttttctatatctttcatgaagctcaagcttgagaaaatcgacgagcaccttcgaaccatgttgcgaaaagtaatctggaagcagtggaagacacctcagaagagggcctggggccttcggaaacttggggtcgacagcgctctcgcacggcggacttcattttgcggcgatagatatgagtgggtggtgaggcgcacctgcgtggcgagagctatatccaaggacgtcttcacgaggcgaggattggtgagctgtctggactactacctcattagacacagtcttaaaaccagctga

SEQ ID NO: 43 - DNA, 1947 bp, synthetic construct
  source 1..1947: mol_type = other DNA
atggactacaaagacgatgacgacaagtacccctatgatgtacctgattatgctgccagcaatttcacacagttcgtccttgtagacaacggcggcaccggggatgttacagtggccccgagcaatttcgcaaacggcgtagccgagtggatctcctctaatagcagaagccaggcttataaggttacatgctctgtaaggcagtcttccgcacaaaatagaaagtacacaatcaaggtcgaagtgcccaaggttgctacacagaccgttggtggagaggagttgccagtggctgggtggcgctcctacctgaatatggagttaacaatccccattttcgctaccaattcagactgtgaactcattgtcaaagctatgcaaggtcttcttaaggatggtaacccaattccaagtgcaattgctgctaattcaggcatttattctggcggcagcagcggcggctcaagcggaagtgaaacacctggaacttccgaaagcgctacgcctgaatcttctggtggatcttctggcggatcttccgcatgcatggagtcttatctcacacaggatagagccgaaccagaggccggctgcggtgctaacagcgtgagtgacaccgagggcgacggaaggacagttcagcacgaccttgttgaggaggtcgtatcttggtccaatctcgaggccgccttaaaacaagtggtgtctaacaggggggctcccggagtcgatggaatgaccgtggacgagcttggaccctggttggagactaattactccgagcttgcagaaaaggtccgcaacggtagatatcggcccaacccggtaagacgaaaagaaattcctaaaccaaatggcggcgtgcgagacttagggattcctaccgtcgtggacaggctgctccaacaggccgttagtcaggtgctgatgcccatatacgagcctagcttcagtgacactagctacggattccggcccggccgttccgctcatgatgctatccagaaagccaaggaatacctgagtgaagggttcggatacgtggtggatctggacctggccagattcttcgacaccctgaatcaggattacctgatgaacatcctgcgggaacgcgtgcgggacaaagcattgttggaacttataaaacgatttttgcgcagtggggtggtcttgccaaatggcctgctgagagaaaccagggagggtagccctcaaggaggccctttgtctcccctgttgtcaaacatataccttgatcgcttcgataagctgttggagtcacgcggcttgagatttgtgcgctacgccgacgattgcctggtgttcgtgaggacaccgagggcgggagaacgcgtgcgcgaatccgttacccggtatctcgagggaaccttgcgcctcagagtgaatcaggaaaagacagttgtgggacgcgccgatcaggtcaaattcttaggtttcagactgtataggcagaagaccgttggggccacggttcatgactcttcactggctcgcttccgaaaagaagtgcgtagaattacgaaacgcaaccgaggaacctcactgggctccgtcctgaccgaactgaagacgttcactcgcggatgggttggatatttccgaatagggttaagcaaatccagggcggagaagctcgatggttggattcgccagagagttaggcagtatattttcaaacagtggaagacactgcggaatcgcgcttcccagcttgtgtctctctgccctgactatttaagacctagacctggcttcacaccgtactcatgggtgcgggagtgtcgacgcgccgccttcagcagaagctattggaaggcggttaattaccccgttgttaagagggccttatccaattcttatctggctggactggggctctactccttatcagagcaactggaaaagtggaataaaggggtatga

SEQ ID NO: 44 - DNA, 1953 bp, synthetic construct
  source 1..1953: mol_type = other DNA
atggactacaaagacgatgacgacaagtacccctatgatgtacctgattatgctgccagcaatttcacacagttcgtccttgtagacaacggcggcaccggggatgttacagtggccccgagcaatttcgcaaacggcgtagccgagtggatctcctctaatagcagaagccaggcttataaggttacatgctctgtaaggcagtcttccgcacaaaatagaaagtacacaatcaaggtcgaagtgcccaaggttgctacacagaccgttggtggagaggagttgccagtggctgggtggcgctcctacctgaatatggagttaacaatccccattttcgctaccaattcagactgtgaactcattgtcaaagctatgcaaggtcttcttaaggatggtaacccaattccaagtgcaattgctgctaattcaggcatttattctggcggcagcagcggcggctcaagcggaagtgaaacacctggaacttccgaaagcgctacgcctgaatcttctggtggatcttctggcggatcttccgcatgcatgaaagacggaatgcagaagacttccgccctcgcaaacgactacccccagagaaacagaaccgaatcagagcggtatggaggggtgcagacctttatgtggatgactgaagacaacatcgtcgaggtgccatttgacaaagaacacctgctggaagtgattctttcaccagataatctgaacaaggcatataaagccgtggtccgaaataaaggctgtggaggcatcgataaaatgtcttgcgagcaattattaccgtggttgaaagccaataaagacgagctcatcagatctttgttagacggcacatatagacctaacccagtgaggcgtgttgagatcccaaaagataatggcaagatgcgacttcttggcattccgaccgtggttgaccgcatggtccagcaggccattaatcaggtcttaaccgtgatctacgaaccacagttcagcaagagatcttttggcttcagacccaggcgcggctgtccaaccgcccttagggaggtccaaaaaatcgtgaacgaagggtacaaatatgtggtggatctggatttagagaggttttttgacactgtctcccacagtaaactgatagaaatactgtctaggacactgaaggacggccgggtggtgagcctgattcaccggtatctgcggtccggcgtgatcgacaagggcctgtggcacgcatctgaggaaggtacaccccagggaggccccttatcaccactgttgtcaaacattatgcttaatgagctggacaaggagttggcgagacgaggacatccttttgttagatatgcggacgattcaatgatcttctgtaaaacaaagcgagcagcagagcgcgtgagagaatctattaccaagttcattgaaggaaagctgttccttaaagtgaataaggaaaaaacggccgtgagttacataaagggagtgagatatcttgggtattccttctacatccacaaaggcaagtgccagcttacggtgcatccaaaaagtaaagccaggatgaaatctcgcctgaaggaactcaccagtcgttcaaacgggtggggttatgaaaagcggaagcagaagttaaaagaatacatacaagggtgggtgggatactaccatctcgcagacatgaaaagactgtgtatggagaccgataaatggctgagaaggcgaatacgtatgtgtatctggaaagcttggaaaaagccgagaacaaaggtggctaatcttattaagtgcgggatcgcagaatggcaagcttaccagtggggcaacacacgtctcgcctattggaggattgcccactcacccatccttcttacggccatcagcaatgaccgtcttaggaagcagggttacatgtgcttgatggacctctatctggaatggaatccgaaatga

SEQ ID NO: 45 - DNA, 1917 bp, synthetic construct
  source 1..1917: mol_type = other DNA
atggactacaaagacgatgacgacaagtacccctatgatgtacctgattatgctgccagcaatttcacacagttcgtccttgtagacaacggcggcaccggggatgttacagtggccccgagcaatttcgcaaacggcgtagccgagtggatctcctctaatagcagaagccaggcttataaggttacatgctctgtaaggcagtcttccgcacaaaatagaaagtacacaatcaaggtcgaagtgcccaaggttgctacacagaccgttggtggagaggagttgccagtggctgggtggcgctcctacctgaatatggagttaacaatccccattttcgctaccaattcagactgtgaactcattgtcaaagctatgcaaggtcttcttaaggatggtaacccaattccaagtgcaattgctgctaattcaggcatttattctggcggcagcagcggcggctcaagcggaagtgaaacacctggaacttccgaaagcgctacgcctgaatcttctggtggatcttctggcggatcttccgcatgcatgagcctgggacgtgccgttcatcaaaaacccggagatacaggacgatccgccggaaggcgaggggaagccgagccaaaagcgatgcgagacgaggcaagaacagcgcggcatgaaactgccagcccaggccgtgaagatcttttaggacaggctttggcatcagcaaaccttgaagcagcatggaaacgagtgaaaagtaatagaggatccgcaggtgttgacggactgagcatccgagacactgcagagcatttgaagatgcattggccaaggattagagcaagcctgttggatggctcatacagatctcagccagtgcggcgagtccagatcaggaagccagacggagggatgcgggagttgggtatcccaactgtcacagaccgcctgatccaacaagctttgcttcaagtactccaaccaagactcgatcccactttcagtgaacactcacatggtttccggcctggcaggagggcgcacgatgctgtgctggaagcgcagagatatgtgcagagtggatacagagtggtggtggatgtggatctggaaaaattttttgaccgagtaaaccatgatattctgatggccaggttggcacgcagaattgacgataaggctgttctgagactcattcgcagatatctggtcgcagggattatggatggtggtgttgtgatggaacgatacgagggaactcctcagggagggcctctgtcccctcttctggctaacgtccttctggacgaagttgatcgggaactggagagacgaggccatcgtttcgtgcgttacgcagacgattgtaatgtgtacgtaagaagcaggagggccggagagcgagtcctggctggactccgtaggctttatgaaaggctgcacctgaaagtgaacgaggctaaaactgcagtggctcccagtagccggagaaaattcctcggctatgccttctggtacgggccgggaggacaggcaaagtgcagagtcgccgataaggcaaaggaaacttttaagcagaggatccgcgaaatgaccagacgatccggtggtcgctctcttccagatattgtcgagaggctgcaaacctaccttcctgggtggaaggcctacttccaacttgcccaaacaccaaaggtgttccatgagctggacgagtggattcgtcacagactgcgcgctgtgcagctgaagcattggcggagaggaaagaccatgtacagagaactcaagacgatgggggcctctgagacagatgcccgacaggtagctgcaaattctcgcaggtggtggagaaattcccgctttctgctcaatagagctatgccgatcgcctattttgatcgcctgggtgtgccaagactgagttga

SEQ ID NO: 46 - DNA, 1962 bp, synthetic construct
  source 1..1962: mol_type = other DNA
atggactacaaagacgatgacgacaagtacccctatgatgtacctgattatgctgccagcaatttcacacagttcgtccttgtagacaacggcggcaccggggatgttacagtggccccgagcaatttcgcaaacggcgtagccgagtggatctcctctaatagcagaagccaggcttataaggttacatgctctgtaaggcagtcttccgcacaaaatagaaagtacacaatcaaggtcgaagtgcccaaggttgctacacagaccgttggtggagaggagttgccagtggctgggtggcgctcctacctgaatatggagttaacaatccccattttcgctaccaattcagactgtgaactcattgtcaaagctatgcaaggtcttcttaaggatggtaacccaattccaagtgcaattgctgctaattcaggcatttattctggcggcagcagcggcggctcaagcggaagtgaaacacctggaacttccgaaagcgctacgcctgaatcttctggtggatcttctggcggatcttccgcatgcatgcaggtggataaggttttcctgatgaccgataacctgtcttctacacaatgccggaacgagacattattgggagccgatggtatcagggcgcgggttgcaggacctcgcccaaaaggagtgagcgtaaaggcaactcctagctggactaaggcagatccgggatggtgtaacattgagaaggtcgttaattcaataattatcgatgaggccctcagtaaggtgatatccaaccgaggctccggtggcgttgaccatatcaccactgctgaactccgcgattattggagcaagtatgggggaaccattaggcaaaagattgtgcaaggaacatacatcccgctgcccgtgaaacgggtggacatccccaaaccaaacggtgacaaaaggatgctgggtattccttccgttattgacagagttatacagcaagcattggttaatgtgctcgagcccgtgtttgacccacagttttctgagttcagctacggctttagaaagggacggaacgcacaacaagcggtcttacaggcacagagttacattaaagacggacatagatgggttgtcgaactcgacttgtctaaattcttcgacagagtgaaccacgatatcctcatgtcacgcgtcgcccgggttgttgaagataaacggatccttaaattgataagaaggtacttgaatgccggcataatggaagatggcatcgtaaaacctcgcagcgagggagtgccgcagggcggacctttatccccgctcatgagcaacatcatcctgactgagcttgaccgcgagttggagaaaagaggccacaagttctgtagatacgcagacgattgtaacatctacgtgaagagcgaggaggccgctaagagagtgctcgaaagtgtcacaaagtacctcgagggcggcctcaaattgagagtcaatcgagataagtccgggacttttcggccatatgagtctgtctttctgggatacagtttccaccgccgaaactggacccgtattgtggtggcagaggagagtattaagcggctgaagacaaagcttaagataatctaccgtcatagtcggggcacgagcctgggcaccgcaataaaaaagttgaaccaaattctgaggggctggaggacatattttaagctggacaccaggaagggcttttttgagaagctcgatattaatattcggactcacctgcgggtcttgatttggcgagcatggaaaagaccacgtacccgcgaaagagagctccgtaaacgtgggctggacgcttttaatgcctggaagagcgccaacaacggccgcggcccctggtataatgcacgagcccctcacatgagaatagcaatcccaaatgctctgtttgtgagactgggcctgtacaacctttcttctatgggcacagtctga

SEQ ID NO: 47 - DNA, 1836 bp, synthetic construct
  source 1..1836: mol_type = other DNA
atggactacaaagacgatgacgacaagtacccctatgatgtacctgattatgctgccagcaatttcacacagttcgtccttgtagacaacggcggcaccggggatgttacagtggccccgagcaatttcgcaaacggcgtagccgagtggatctcctctaatagcagaagccaggcttataaggttacatgctctgtaaggcagtcttccgcacaaaatagaaagtacacaatcaaggtcgaagtgcccaaggttgctacacagaccgttggtggagaggagttgccagtggctgggtggcgctcctacctgaatatggagttaacaatccccattttcgctaccaattcagactgtgaactcattgtcaaagctatgcaaggtcttcttaaggatggtaacccaattccaagtgcaattgctgctaattcaggcatttattctggcggcagcagcggcggctcaagcggaagtgaaacacctggaacttccgaaagcgctacgcctgaatcttctggtggatcttctggcggatcttccgcatgcatggtgtcactcgaaaaaatacttgagcctagtaatctgactgaggccctgaaacaagtggtgtctaacaaaggggctccaggcgtggatggaatggccgttgacgagctggagcctttcattagaaaccatcccggagtgctgtcccaggccatccgggatggctcttatcgcccctctcccgtgaagagggtgtacattcctaaagacaatggggaaaaaagaccactgggcatccctactgtggtggacagactggtgcagcaggctatagcccagaaactttcagaagagtacgagcctaatttttccgacaatagtttcggttttcggcctaaacggtgcgcccatgatgccctgaagagaatagttgacaatgctaacgacggttatgagtacgtcattgatctggatctcgccaaatttttcgacaccgtgaaccatagcaaaatgatccaggttttgagcgagaccgtaaaggacggaagggtggtgagtcttgtgcacagatttttcagggccaagattaatgacgaaggcaaaattatcaaacctgccatcggtatgccgcagggcggaccactgagtcccgtctgtgctaacatactcctcaatgagctggatcagttacttgatggcaggggccatcgttatgtccgttacgcggatgacatgctcctgcagttcaggtcacttcgcgccgcagagagggtgttcacttccgtgaaaagattcattgaggagaaactcttcctcaaggtgaacgtggaaaagaccaagatatgccacctctcaaaagacgtgaagtttctgggctactccttctataaaagttatgacaaagacgacttggacgggaagggcaagtggaagctcgtagtacacggaaagaagaggagaagctttgagcagaccattaaaacactgctggataggaagtgtcctaagggcctggaaagatgtaaggaggatctgaaactctatctgtgtgggtggaccaattatttctacatggggctttccagatccagaagacagtcctatgataagtggatcagacggcggatcaggcagctgtactggaaaatttggaaaaagccttctacgagaatccgggccctgatgcagctggggatcgaacgtagcaaagctaacgagtgggggaactctagtaaggcctactggagggtggctggatcttggattctgaagcgatctctcacgaacgacgtgttgcaaaacttgggctggatatggttgggcatagcccggaagtggtcaccccagtga

SEQ ID NO: 48 - DNA, 1854 bp, synthetic construct
  source 1..1854: mol_type = other DNA
atggactacaaagacgatgacgacaagtacccctatgatgtacctgattatgctgccagcaatttcacacagttcgtccttgtagacaacggcggcaccggggatgttacagtggccccgagcaatttcgcaaacggcgtagccgagtggatctcctctaatagcagaagccaggcttataaggttacatgctctgtaaggcagtcttccgcacaaaatagaaagtacacaatcaaggtcgaagtgcccaaggttgctacacagaccgttggtggagaggagttgccagtggctgggtggcgctcctacctgaatatggagttaacaatccccattttcgctaccaattcagactgtgaactcattgtcaaagctatgcaaggtcttcttaaggatggtaacccaattccaagtgcaattgctgctaattcaggcatttattctggcggcagcagcggcggctcaagcggaagtgaaacacctggaacttccgaaagcgctacgcctgaatcttctggtggatcttctggcggatcttccgcatgcatgtgtgaaatacgaaaggtagaaacggacatggaacttcttgaggaggttctgtctaaagataacctcaataaggcctataagcaagtgtacaagaacaaaggagcttccggagtggatggcgtaactgtggacgagctcttctcttatatacaggaacacaaagaggaaatattatggaaaattagaaacaggaaatataagcctcagccggtgagaagggtcttaatccccaaagataatggcaaaatgcggaaacttggaatcccttcagtgattgatagagtgattcagcaggcgattgtccaggtcttaacccccatttacgaagagcaattttcaaaccattcatacggctttagaccgaagcgctcctgcgagatggccgtggtacaggcactggagtacttcaacgacggatatgactggattgtggatattgaccttcaaagcttcttcgatgaggttaaccaggataagctgatcgggattattagaaggaccattaaagatggggatttggttagcctcatacgaaagttcctgcagtcaggtgtgatggaaaatggcgtcttgcagccgacaaaaaagggtactccccagggggggaacctgtccccccttctgtctaacataatgcttaacgaacttgacaaggagttagaagcgagaagactgcatttcgtcagatatgccgacgactgtctcattctcgttaagagcgaaaaagcagcgaacagggttatggagagcattacgaagttcatcacaaagaaattaggactgaaggtgaatgtcgagaaaagcaagatcgctaggccagatgatataaaatatttaggctttggtttctacaagaaaataaatcagaatgagtggcggcccaaaccccatatcaagtccgtgcagaagtttaagacaaagcttcgcgacattctggtacgttcacgtagcattagcctcgacgatcgcctcctgagattgaagcagctcatttacggatgggtgaattatttcagaatcgccgatatgaccattcttctgcgtgacatcgatggcaacatccgtcgcaagttacgtgttatcatctggaagcagtggaagaaaataaaaaaacggtacgcctgtcttcgaaaattagagattactcatagggacgcttacgtgaccgctaattcacggagtggatattaccatatctctcatacaagggtgctggagaaggccatttcaaaagagcgcttaaacaagaggggccttgtaaactcactggattactatctgaaggtgcatataatcacgaattga

SEQ ID NO: 49 - DNA, 1938 bp, synthetic construct
  source 1..1938: mol_type = other DNA
atggactacaaagacgatgacgacaagtacccctatgatgtacctgattatgctgccagcaatttcacacagttcgtccttgtagacaacggcggcaccggggatgttacagtggccccgagcaatttcgcaaacggcgtagccgagtggatctcctctaatagcagaagccaggcttataaggttacatgctctgtaaggcagtcttccgcacaaaatagaaagtacacaatcaaggtcgaagtgcccaaggttgctacacagaccgttggtggagaggagttgccagtggctgggtggcgctcctacctgaatatggagttaacaatccccattttcgctaccaattcagactgtgaactcattgtcaaagctatgcaaggtcttcttaaggatggtaacccaattccaagtgcaattgctgctaattcaggcatttattctggcggcagcagcggcggctcaagcggaagtgaaacacctggaacttccgaaagcgctacgcctgaatcttctggtggatcttctggcggatcttccgcatgcatgtctaaagccatgaggcagatgcctgggcagcccggcagagtatgcgtggctcacggcgaagccgtgcgcgacctcatctcagatgaggcaggaggcccacctcgcgaacatcccgatactggctctgcaactcctccgacaggacccggggggttgctggcagcgatgctgaccagacagaacttacagttagcatggaagagagtcaaggcgaataaaggagcagctggagtggatggacttgacatcgaacagactgctcagacacttcgtactcgttggcccgatattagacagtctctgctgcaggggcggtacaggccgtctcccgttcgtaaagttatgatcccgaagccagatggaacacagcgcgagctgggtattccaacggtcactgaccgcttaatccagcaggcacttctgcaggtgctgcagcccttaatagaccccacattcagcgaacacagctatgggttcagacccggacggagggctcatgatgcggtgaaagccgcccgagcgtacgttcagtcaggaaagagagtggtcgttgatgtggatctcgccaagtttttcgatagagtgaaccatgacatattaattgatcggctcaacaggagggtggacgacgccggagttattagacttgttcgcgcttacctgaacgcaggtattatggacggaggggtcgtggtggatcgacacctgggaaccccccagggcggacccttaagtccactgttggccaatgtactgctggatgaggtggataaagctcttgaggcccgcgggtattgctttgcccggtatgcagacgactgtaatgtgtacgtgggctccaagaaagcgggagagcgggtgatggcatatccgtacctgcggaggctttatgtgaacctgaagctccagataaacgaggccaagagcgctgtcgcgtccgccttcggccggaagttcctgggttatgccttgtgggtggctaaaggcagggaagtcaagtgcaaagtggcgcagaaacccctgcagaactttaaggcgaggattcgacagttaaccagaaggagtggcggccggagcatggctcaggtcgtcgataagctccggccctacttgctcggatggaaggcatatttcgggatggcacaaaccccgggggtttggaggggactggatgagtggctgagacaccggctgcgcgccatccagctcaggcaatggaagagaccaaagactatccatagagaactgaaggctctgggggcgtcagacgacgttgcgaagcaggtggctggtaattgccaccgttggtggcgaaactcagacggtgttatcaagcgtgttttggccatagcgtactttgacagactgggagtgccacgactgagttga

SEQ ID NO: 50 - DNA, 1908 bp, synthetic construct
  source 1..1908: mol_type = other DNA
atggactacaaagacgatgacgacaagtacccctatgatgtacctgattatgctgccagcaatttcacacagttcgtccttgtagacaacggcggcaccggggatgttacagtggccccgagcaatttcgcaaacggcgtagccgagtggatctcctctaatagcagaagccaggcttataaggttacatgctctgtaaggcagtcttccgcacaaaatagaaagtacacaatcaaggtcgaagtgcccaaggttgctacacagaccgttggtggagaggagttgccagtggctgggtggcgctcctacctgaatatggagttaacaatccccattttcgctaccaattcagactgtgaactcattgtcaaagctatgcaaggtcttcttaaggatggtaacccaattccaagtgcaattgctgctaattcaggcatttattctggcggcagcagcggcggctcaagcggaagtgaaacacctggaacttccgaaagcgctacgcctgaatcttctggtggatcttctggcggatcttccgcatgcatgaaggagactaagaagtgtgatgaaagtcgccagctcaacatccagacaggacacctgcaaaaagaccgcgtcgagttggagtcctacgctaaagcgcccagcattagcgtaacttctgacaacaggcagaatgcgaggcgagaatgtcactacggcctgctcgaaaatataatatcttccgagaacctgaatgaggcatttaaacgtgtcaagaaaaataaaggttctcatggggaagaattgagacaatctatcgccgacggtagctataaaccaaacccagttcgcagggtggaaatacccaaggataacggcaaaattcgcccacttgggattccaactgtagttgatcgagtgattcagcaggctatatcacaggtgcttacacctatattcgaaaagaaattttctgaaaattcttatggattccgacctaatagatccgcgcatcaggccattctcaaatgtaaggagtacatggacgaggggtaccgatgggcagtcgatatagatctggaaaaatatttcgatacggtaaatcatgacaaactgatcggattgatatataaagaaatcaaggacattcgggtgattggacttatcagaaaataccctaatgctggcgtgatggaaaaagggttgaccagtctcactctcgagggcgtcccacaaggtgggaatctttcacctcttctgagcaatataatgctgaacgagcttgatatggagcttgagcggagaggtcttcgcttctgtcgttatgctgacgactgtaacgtttacgtgaagagcaagaagagcgccgagagggttatgaagagtataacaaagtttatagaaaaagacctgaaactgaaagtaaataaggaaaaatctaaggtggacaggccatggaaactgaaatatctgggttacacgttttatacaaagaaaggcgagatgggaatccgtgtgcaccaggtatctattaagaaactgaagggaaagctcaagtcaattaccggtaggtccaacgctatgagcatggagctccgggccgttaagctgaaacagctgatcgttgggtggataggttacttcaagctggctgatatgaaaagcacgctgagggaattggatgagtggctgcgacggcgcctgcggttatgttactggaaacagtggaaaaagatcaagaccaaacatgacaatcttgttaagttgggggtcgaaaactggaaggcttgggaacacgcaaatacacggaaaggctactggaggatctctaattcccccatattagcgacgacactcaccaataagtatttgcgcgagcagggcttcatcacgctgtctgaacggtactcacaggtccgatga

SEQ ID NO: 51 - DNA, 20 bp, synthetic construct
  source 1..20: mol_type = other DNA
tggcgagaaaggaagggaag

SEQ ID NO: 52 - DNA, 20 bp, synthetic construct
  source 1..20: mol_type = other DNA
ccgaaacaagcgctcatgag

SEQ ID NO: 53 - DNA, 132 bp, synthetic construct
  source 1..132: mol_type = other DNA
gagtccgagcagaagaagaagttttagagctagaaatagcaagttaaaataaggctagtccgttatcaacttgaaaaagtggcaccgagtcggtgcgtgatgggagcccttgttcttctgctcggttttttt

SEQ ID NO: 54 - DNA, 112 bp, synthetic construct
  source 1..112: mol_type = other DNA
gttttagagctagaaatagcaagttaaaataaggctagtccgttatcaacttgaaaaagtggcaccgagtcggtgcgtgatgggagcccttgttcttctgctcggttttttt

SEQ ID NO: 55 - DNA, 202 bp, synthetic construct
  source 1..202: mol_type = other DNA
ggcaaaccgcctctccccgcgcgttggccgattcattaatgcagctggcacgacaggtttcccgactggaaaggagacccgggcagtgagcgcaacgggtctccaatttaagccagccccgacacccgccaacacccgctgacgcgccctgacgggcttgtctgctcccggcatccgcttacagacaagctgtgaccgtctc

SEQ ID NO: 56 - DNA, 21 bp, synthetic construct
  source 1..21: mol_type = other DNA
gagacggtcacagcttgtctg

SEQ ID NO: 57 - DNA, 38 bp, synthetic construct
  source 1..38: mol_type = other DNA
gctcttccgatctnnnnnattgacggcggcatcggact

SEQ ID NO: 58 - DNA, 39 bp, synthetic construct
  source 1..39: mol_type = other DNA
gctcttccgatctnnnnngagacggtcacagcttgtctg

SEQ ID NO: 59 - DNA, 34 bp, synthetic construct
  source 1..34: mol_type = other DNA
gctcttccgatctnnnnnggcaaaccgcctctcc

SEQ ID NO: 60-61 - skipped (2 entries)

SEQ ID NO: 62 - DNA, 10 bp, synthetic construct
  source 1..10: mol_type = other DNA
cgagcagaag

SEQ ID NO: 63 - DNA, 13 bp, synthetic construct
  source 1..13: mol_type = other DNA
gtccgagcagaag

SEQ ID NO: 64 - DNA, 20 bp, synthetic construct
  source 1..20: mol_type = other DNA
aaaaaaagtccgagcagaag

SEQ ID NO: 65 - DNA, 55 bp, synthetic construct
  source 1..55: mol_type = other DNA
attgacggcggcatcggactnnnnnnnnnnnnnngagacggtcacagcttgtctg

SEQ ID NO: 66 - DNA, 1323 bp, synthetic construct
  source 1..1323: mol_type = other DNA
atggctagcgcatggagtcatcctcaattcgaaaaatccggaatggatacctcttctctgatggaacagattctgagcaaggagaatcttaatgccgcctacttgcaggtagtgcggaacaaaggggcggcgggcgttgatggcatgaatgtagaggaactcggcgcctatttatccgagaatggcgaaaacattcgtgagcaattacgcactcgaaaatacaaaccgcagccggtccgtagagtggaaatcccaaaaccggacggcggtgtacgtaacctgggggttcctacagttgttgatcgtttcgtacaacaagccgttgctcaggttttaacacctatctttgaagaacagtttcatgatcattcctatggttttcgcccgaatcgctgcgcacagcaggcagtactgaaagcacttgagatgatgaatgatggtcacagttggatcgttgatatagatctggctaagtttttcgatacggtggaccatgataaactgatgactatcttcgggcgtacaataaaagacggcgatgtgatttcagtcgtccggaaatttcttgtctcaggcgttatgattgatgacgagtatgaggacacgatcgtaggtaccccacagggtggtaacatttcacctcttctggcgaacattatgttaaatgagcttgacaatgagcttgaggctcgcggcctgaatttcgttcgatatgcagacgatcttattattatggtcgggtcaaaacaagcagccgaccgcgtgatgaaaagtgttacccggtttatcgaggaaaagctgggtttgaaagttaacgcggaaaagtcaaaagtggacaagcctaaaggtatcaagtacttgggttttggtttttatttcgatacttttgctaaggcatataaagcgcgtcctcatcctaaagcagttactaaatttaaagcacagatgaaaaaacttacttgtcgttcatggggcgtaagtaacgcctataaagtacaaaaactcaatcagctgattcgagggtggatcaattattttaaaataggaaacatgaaacgtctttgccagcgtttggattcaaatattagataccgcctccgtatgtgtatttggaaacactggaagacgcctaaaaacagagccaaaaatatgatgaaactgggtctgccggcatgggctgcatggcgctctgcctatatccatggttacgctcgagtgtgccgatctcgagatgtccatcggacaattacctcagaacgtttgaaacagtttggactgatgagtatgaccgattattatactgaacgtagcgtagcgtgctga

SEQ ID NO: 67 - DNA, 1326 bp, synthetic construct
  source 1..1326: mol_type = other DNA
atggctagcgcatggagtcatcctcaattcgaaaaatccggaatggacaccagcagccttatggaacagattcttagcaaagataatctcaatgcagcttatctgcaggtggtccgcaataagggtgctgcaggtgtggatggcatgaccgtggaagagcttggcgcttatctttcggaaaacggtgaatctattcgggagcaacttcgtacccgtaaatatagaccccaaccagtgcgtcgggcagaaatctctaagccggatggtggcgtgcgtaaattaggcgtaccgactgtagttgatagatttgtccagcaggcggtagcgcaggtgctgactcctatttttgaagaacagtttcatgaccacagctacggttttcgacctaaccggtgtgcgcagcaggccgtgctcaaggcattagagatgatgaacgacggccatagttggattgttgacattgatctggctaaattttttgatactgtagatcatgataaacttatgaccattttcggtcgcactattaaagatggtgacgtgatctctgtggtacgtaaattcctggtgtccggtgtgatgattgatgatgagtacgaagatacgattgtcggcactccacagggaggcaatatctctccgcttctggcgaacatcatgctcaacgaacttgacaaggagctggaggcgcgtgggctggattttgttcgttacgcagacgatttgattattatggtgggtagtcgccaggccgctgacagagtaatgaagtcggtcacccgttttattgaggaacgattaggccttaaggtcaacgctgagaaaagcaaagtcgacaaacctaaaggcataaaatatcttgggtttggattttactttgacagttttgccaaggcgtacaaggcccgcccgcatccaaaggcggtggccaaatttaaagcccagatgaaaaaacttacttgtagaagctggggagtatcgaattcatataaggttctgaaactgaaccagctgatacgcggttggatcaactattttcgtatagggagtatgatagagctgtgtaaacgtctggatgagaatattcggtttcgcctgcgtatgtgtatatggaaacactggaaaactccgaaaaaccgcgccaagcttttaatgctgctcgacgttccgcgctgggccgcttataagatagcatactcaggcaaccgttatgcgcgcattacccataatggttgggttcataaggcaatttccaataaacgtctcgcggccttcggcttgatctccatggaagactactatgcgaaacggcgtgttgcgtgctga

SEQ ID NO: 68 - DNA, 1326 bp, synthetic construct
  source 1..1326: mol_type = other DNA
atggctagcgcatggagtcatcctcaattcgaaaaatccggaatggacacaagtagtttgatggagcaaatactgtcgaaagacaatcttaatgctgcatacttacaagttgttcgaaataaaggggcggcaggggtagatggcatgactgtagaggaattaggtacctatctcagtgagaacggtgagtcaatccgtgagcaacttagaacgagaaagtataagccacagcctgtaagacgcgttgagattcctaagccggacggcggtatacgcaacttaggggttccgacagtagtcgaccgcttcgttcaacaggcagtagctcaggtgctgactcccatcttcgaagagcaatttcacgaccattcctacggattccgccctaatcgatgtgcgcaacaagctgtcctgaaggcgctggagatgatgaatgacgggcacgattggatcgtggacatagacttggcaaaattcttcgatactgtagaccacgataaacttatgacaatattcggacggaccattaaggacggggacgtcatctctgtggtgcggaagttcttggtttccggagtcatgattgacgatgagtacgaagacacgatcgttggaacaccgcaaggtggcaacattagcccaccactcgccaatattatgcttaacgagcttgataaagaactggaagcacggggcctggacttcgtgcgttacgcagacgatctcattataatggtaggatcccgccaagcagccgatcgtgtaatgaagagcgtaacgcgctttattgaggagcgcctcggcctgaaagtcaacgcagaaaagagtaaggtcgacaagccgaagggaatcaagtatctgggtttcggtttctacttcgatagttttgccaaggcctacaaggcgcgccctcaccaaaaggccgtggccaagttcatggcgcaaatgaagaagttaacttgtcgttcttggggtgtatcaaacgcgtacaaggtccagaaattaaatcagcttatcagaggctggatcaactactttaagattggatcaatgaaggggctttgcgaacgcctggactgcaatattcggtatcgccttagaatgtgtatctggaaacattggaagacaccgcaaaatcgggcgaaatacttgatgcaactgggtattggacggaagtacgcctggagtacggcatatactggcgcccgtatagcgtacgtttgtcaacggggtgccatgaacatggccattaccaaggaacgccttacgagatttgggttggtaagtatggctgactattacgccaagcgtcgtgtcacgtgctga

SEQ ID NO: 69 - DNA, 1323 bp, synthetic construct
  source 1..1323: mol_type = other DNA
atggctagcgcatggagtcatcctcaattcgaaaaatccggaatggatacgtcttctctgatggagcagattctgagcaaggaaaatctgaacgaagcctatctgcaggtcgttcgcaataaaggtgcagccggcgttgatggtatgtcggttgaagaattaggcccgtacctttccgaaaatggtgaaaatatccgcgaacaaatgagaacccgtaaatacaaaccacaacctgtgcgccgcgtggaaataccgaaaccggacggcggtgtgcggaatctcggtgtgccgaccgttgtagatcgcttcgtccagcaagcggtagcccaggtgctgtcaccaatctttgaagaacagtttcatgaccacagttatggtttccgtccaaaccggtgtgcccagcaggcagtgttgaaagctctggaaatgatgaacgacggccataattggattgtagatattgatctcgccaagttctttgatacagttgaccatgataaactgatgacgatttttggtagaacgatcaaagatggtgacgtaatttccctggtgcgcaaatttcttgtttctggtgtgatgatagacgacgaatacgaagatacgattgtcgggacgcctcagggtggtaatatcagtccacttcttgctaacatcatgctgaacgaacttgacaaagaactggaggctcgtggtttagattttgtgagatatgccgatgacctgatcatcatggtgggttctcgccaggcagccgaaagagtaatgaaaagcgttacgcgttttattgaaaataaattaggtttaaaagttaacgctgagaaatcccgggtagataaacctaagggcatcaagtatctgggttttgggttttattttgattcgtttgcaaaaggctacaaagcacggccccatatgaaagctgtggaaaaattcaaagaacagatgaaaaaattgacatgtcgctcttggggcgtatcaaatacctacaaagtaaaaaagctgaaccagctgatacgggggtggatcaactattttaaaataggttccatgaaaaacctgtgccgtaaattagatgcacacattcgttttcgtttgagaatgtgcatatggaagcagtggaagacgccaaagaacagagaaaaaaatctgattaaactgggcttacctcgttatgcagcccatgggatctcctatgcaaaagggtatgcacgcgtctgtcgttcttggaatttacacatcagtatctcgaaagaacggctggccaagtttggactgatttcaatggaagattattatgcagagcggagagttacgtgttga

SEQ ID NO: 70 - DNA, 1332 bp, synthetic construct
  source 1..1332: mol_type = other DNA
atggctagcgcatggagtcatcctcaattcgaaaaatccggaatggatacctcaagcctgatggagcagattctttcaaatgagaatttgaatgcggcttatttacaggtcgtccgtaacaagggagcagcaggtgtggacggtatggagtatacagagttacaaaaacatctcagcgagaacggggagataattaaagaacagcttcgcacacgtaaatataagcctcaaccagtccgtcgcgtagaaattccgaaagccgatggaggtattcgcaaactgggcgtcccgacggttaccgatcggtttattcaacaagccattgcacaggtcttaaccccaatttatgaggaacagtttcacaatcatagttatggctttcgccccaatcggtgtgctcaacaggctgtcatgaaagctctggagatgatgaatgatggccatagctggatcgtagatatcgatttagaacgcttttttgacaccgttgatcacgacaaattaatgacaattataggccgcaccattaaggatggtgacgttatatcaatcatcagaaagtttcttgtctcgggcataatggtcgatggcgagtatgaagatagcgtaattggtacgcctcaaggtggcaatttatcaccactgttagccaacattatgttaaacgaactggataaagaaatggaagctcgaggtctggattttgttcgttatgccgatgactgtattattatggttggctccagacaggctgctgaacgtgtgataagatcaataacccgctatatcgaagagaagttggggttgaaagttaatgcgtcaaaaagtaagatagacaaaccaaagggaattaaatatctggggttcggattttattatgactcatttgcaaaagagtaccgtgctaaacctcatgcaaaggccgtcgagaagtttaaagcacgtatgaaagagctgacgtgccgttcttggggtgtcgataacggttataaggtcaaaaagctcaatgaattgatccggggttggataaattatttcaaaattggaagcatgaaagggttatgcgagaaactggacgcgaacatccgttaccgcctgcgcatgtgtatttggaaacactggaaaacacctcagaacagagcaaagaatctcattaaactcggaatatcacgccggtacgcatggtcaaccgcgtattccggggcacgtatcgcgtacgtctgtcagcgtggggccatgaatatagctgtaaccaaggagagattgaccagattcgggttggttagcatgcttgactactacgtcgagcgccggagcttgatgctgtcgtga

SEQ ID NO: 71 - DNA, 1347 bp, synthetic construct
  source 1..1347: mol_type = other DNA
atggctagcgcatggagtcatcctcaattcgaaaaatccggaatggagttaattgattggattctggcagaccaaaatattgatgccgccatttgggctgtgaaacataatcgtggtgccgcggggattgattccatgcaggtcgacgaactggatgagtatttcaaaaatcatcgcgaggaaatcaaacagcttatccgtgaaaaaaaatacgtacctcaaccggtccggcgcgtatacatccccaagccggacggaaaacaaagaccactgggcattccgaccgtcgtcgatagagttatccaggaggcaattgccatagtgctgatgaaaggatatgatcgctacttttcagagtatagctacggatttcggcctaatcgtaattgccatcaagccgttacgaaagccctggaatatatgaattctggctatgaatgggtggtggatctggacatagaaaagtacttcgatactgttaatcatgataaactcgtttctattctgcgggaacgcataaatgacgatacgactcttcacttgattcgggccttcctgaaagcaggtgttatggaaaacggtctggtttcccctaccgaacagggagtaccgcaaggcggccctctgagccctgtgttaagcaatgtgtatttggataagcttgatcgcgaacttgaaaatcggggcctgcacttttgtcgctatgcagacgactgcaccatctacgtcggatcggaaatggctgcgaatcgtgttatgcgctcaattgcggactggcttggccgaaagttaaaattacgcgttaacatgacaaaaagcaaggttgtacgccctagtggctcacagttcctgggctttagattttggaaaagtccgcgcgaaggatggaaacccaaaccagcaaaagagcgctgtaaacgtctcaaagacaaggtacgggcaatcttatgccgccgcaaagccgttgcggtaccgctcggtgttacgatcacaaaactgaaccaactgatgcgtggctggattaattacttctgtctcgggagcatgaaaggttttatgaaggaatttggcgaatggatgcggcataaggtacgagtggtcatcttaaaacagtggaagaaggcggataccatctatcgcaatttacggaaaacgaacagaatttgtcgctgcgggattagtgatgaagaaatatacaaggtcgcatactcaggtcggggctggtataaaagagcaacacacaatgcagtaaatttcatcctgagtccacaagttttatctcagagaacgaaacagcgcccagggctcgttgatcctctgaaatattatctggcaagatgtacctga

SEQ ID NO: 72 - DNA, 1434 bp, synthetic construct
  source 1..1434: mol_type = other DNA
atggctagcgcatggagtcatcctcaattcgaaaaatccggaatgggaaccgaaaaccgcgaatcatgtagtcaacgtgattcagctgaaagaaaaggatatgtccgtgcgcatagaagttttaaccgtatttggaaggaacgggatagcgccgaaccagatattctcggcaaaattctggagaaagataatctcaaccgggcatataaacgtgtgaaagccaataaaggcgctccgggcgttgatggtatgacaattgaagccacattaccgtggttaaaagagcacaatcatgaacttgttgaacgtatcagaaaaggaaaatatacaccgagtccggtgcgtcgcgttgaaatcccgaaaccggatggaggtatacgcaaacttggaatcccgaccataattgatcgtattattcagcaggccatgcttcaaccgctgctgcctatctatgagccccttttttcagatgattcgttcgggtatcgccctggtcgaggtgccaaggacgcgatttttcgcatcaaagaatacattgaacaaggctacacaagagccgtggttttggatctgtctaaatattttgacacgctcaaccacaccatactgcttaatctgctgcgtcgccaggtcaaggatgaacgcgtcattcaaatggtgaagcgctaccttaagtctggtgtgatggaaaatggtgtggtcgcagaaaccgaagaaggatcaccgcagggggggaacttgtcccctctgttagcgaatgtgtatttgaatgaatttgactgggaattccatcgtcgcggcgttccgtgcatacgttatgccgacgatatagttctgttagctaaaagcgaacgagctgcggagcgcctgctcgagtcatcagctaaatacctcgaggaaaccctcaagctgaaggtgaatcgggagaagagccgtaccgtatcggtgttcgccatccgcaattttaaatttctgggcttctgtttcggaaagaatggtaagggtatatatattcggattcacggcaaatcctggaagaaagctaaagacaaacttcgtcagctgacgtctagatccagatgcggttctatcgtgcgtacaatggaaaaaatcaaagtgtatatgcgtggttggttaaattattatggcattgctgatatgaaaaataatatggaaagtttgaacggatggctctatcggagaatccggatgtgcatttggaagcagtggaaactgccgaagaccagaaaacgaaaactggctggtctgggagtcgattcacactatgccgcaactattgcctacgatcgcaagggttattggtttaacgcgggtaataaggccgtgaactgggctctgagcaaggaacgcttgaccaattgggggctgtacgatctggctacggcatatcaaagtgtccatgtaaattattga

SEQ ID NO: 73 - DNA, 1323 bp, synthetic construct
  source 1..1323: mol_type = other DNA
atggctagcgcatggagtcatcctcaattcgaaaaatccggaatgaaacttattgaaactatactcttttcagagaacgtaatcaaagcccagagccgtgtattatcaaataaaggcggagcaggcattgatggcatgcacgtggacgagctggcagaatatatgcgtgctaactgggatggtattaaagaaagtattctggtgagaaaatacaaccctgctcctgtacgccgtgtcgaaattccaaaagtaaacggtggagtgcgtaaattaggcatccctacggtccttgaccgcactattcaacaggccattgtgcaggtgttatcacctattttcgaaaacgagtttcaggaaaatagctacgggttccggccgtgtcgttcgtgcgaacaggcgattttaaaattattagagtatcttaatgaaggttatgagtggatcgttgatattgatttggaaaagttcttcgataatgtaccgcaggataaactcatgagttacgtcggcagagtgatccgtgatccggatactgaatcactgatccgcaagtaccttaagagcggcgtgatggaaaatggaatctacgaagccacagaagagggcaccccccagggcggtaacctctcgcctttattgagtaacattatgctgaacgaactggataaagaattagttaaccgtggcctgcattatgttcggtatgcggatgactgcgtgattgcggtgggcagtgaggcaagtgcaaaacgtgtcatgcggtcagttacgacctggattgaacgggaattgggcttaaaagtgaacgcttcaaaatctcatatatgccgtccaaccaagttgaagtatcttggcttcggcttttatcgaaacccccaaaatcgccagtggcagtcgcgtccgcacgaaagctcagtttcgaaattcgttcgctctctgaagcgcttgtgcaagcgaagctggtcagttagcatgacagatagaattactcgtttgaattatgttacccggggctggatcaactatttctcaatttccttcatgaaattgaagctcgagaaaattgatgagcatttacgtaccatgctccgcaaggtaatatggaaacaatggaagacacctcaaaagcgtgcgtggggtttaagaaagctgggtgtcgacagcgccttagctcgccgtacatctttttgtggggatcgctacgagtgggtagtgcgccgcacttgtgtagcccgcgcaatttccaaagatgtttttacgcgtcgcggcctggtttcgtgccttgattattaccttattagacatagcttgaaaacgtcgtga

SEQ ID NO: 74 - DNA, 1443 bp, synthetic construct
  source 1..1443: mol_type = other DNA
atggctagcgcatggagtcatcctcaattcgaaaaatccggaatggagtcttacctgacgcaagatagagcggagccagaagcaggttgtggtgcgaattcggtatcggacactgagggtgacgggcgcaccgtacaacatgacctggtggaagaggttgtctcttggagtaacctggaagccgcgttaaagcaagtggtgtcgaatcgtggggcccccggggtcgatgggatgacagtcgacgagttaggaccgtggttagaaaccaattatagtgagttggcagaaaaggtacgtaatggtcgatatcgtccaaacccggttcgccggaaggagattccgaagccgaacggcggtgtgcgtgacctcggaataccgactgttgttgatcgtctgctccagcaagcagtgagtcaggttttgatgcctatttatgagcctagcttctcagacacatcatatgggttccgcccgggtcgttcagcacatgacgcaattcagaaagccaaagagtaccttagcgagggcttcgggtacgtagttgatctcgacttagcgagattcttcgacacacttaatcaagattacttgatgaacatccttcgtgagcgtgtccgcgataaggccctgctggagctgattaaacggttccttcggagcggcgtcgttcttccgaacggcctgctccgcgagacacgtgaaggtagtcctcagggtggaccgctctcgccattacttagtaacatataccttgatcggttcgataagctcctggaaagccgcgggcttcgcttcgtgcgttacgcagatgactgcttggtcttcgtgcgaactccgcgcgccggcgaacgcgtccgcgaatcagtcactcgttacttagagggcactttgcggttacgcgtcaaccaagaaaagaccgtagtcggacgtgcggatcaggtgaagtttctcgggttcagattgtaccggcaaaagactgttggtgccaccgttcatgactcctcattggcgagattccgaaaggaagtacgccgcatcaccaaacgtaatcgcggtacgagcctgggcagcgtactgacagagctgaaaacctttacgagaggctgggtggggtatttccggattggcttaagtaagtcacgtgccgaaaagctggatggctggattagacagcgcgtccgacaatacattttcaagcaatggaaaaccctgcgcaaccgagcaagtcagttagtatctttatgtcccgactatttgcggccgcgcccgggtttcacaccatacagttgggtgcgcgagtgtcgccgcgcggcattttcgcgctcgtactggaaggcagtgaactatccagttgtcaagagagctttatctaattcgtacttagccggccttggactgtactccctgtctgagcaattggaaaagtggaataaaggcgtttga

SEQ ID NO: 75 - DNA, 1449 bp, synthetic construct
  source 1..1449: mol_type = other DNA
atggctagcgcatggagtcatcctcaattcgaaaaatccggaatgaaggatggtatgcagaaaacatccgcattagccaacgactatccgcagcgtaatcgtactgaatcggaacgttatggaggtgtgcaaacctttatgtggatgacggaagacaacattgttgaggtgccttttgacaaggaacacctgttagaagttatcttgtctccggataatctgaataaagcctataaagcggtcgtccgaaataaggggtgcggcggtatcgataagatgtcctgcgaacaactgttgccatggttgaaagccaataaagacgaactcattcgcagcctgttagacggaacttaccgtcctaatccagttagacgggttgaaattcctaaggataatggtaaaatgcgtcttcttgggataccgaccgtggtagatcggatggtacagcaggcgattaaccaggttctgactgtaatctatgaaccacaatttagtaaacggtctttcggatttcgaccgagacgtggctgcccaactgccttacgtgaagtgcaaaaaatcgttaatgaaggttacaagtatgttgtagacttagacctggagagatttttcgacacagtttcacattcaaagttgatcgaaattctcagcagaacattaaaagacgggcgtgttgttagcctgattcaccgctatctgcggagcggcgtcattgacaagggcctgtggcatgcttctgaggagggtacccctcagggtgggccgttatctccactgttgtccaatattatgcttaatgaactggataaagaactggcgcgcagaggtcacccatttgtgagatatgctgatgacagcatgatattttgtaaaacaaagcgcgcagctgagagagtgagagaatcaatcactaagttcattgaaggtaaactttttttgaaagtcaataaagagaaaacagctgtctcatacattaagggggtgcggtacctggggtattcattttatattcataagggcaaatgtcagctgacagttcaccctaagtctaaggcgcgcatgaaatcgcgtctcaaagagcttacgagccggtcaaacggttggggttacgagaaacgtaaacagaagcttaaagagtatattcagggttgggtgggatattaccatctggcggatatgaagcgtttatgcatggaaactgataaatggctccgacgtcgcattcgcatgtgtatctggaaagcatggaagaaacctcgtactaaggtagcgaacctgataaaatgtggcatcgcagagtggcaagcctatcagtgggggaatacacggttggcgtattggcggatcgcccacagccccatcctgttaacagcaataagcaatgatcgcctgcgtaaacaaggatatatgtgccttatggatctgtatctggagtggaaccccaaatga

SEQ ID NO: 76 - DNA, 1413 bp, synthetic construct
  source 1..1413: mol_type = other DNA
atggctagcgcatggagtcatcctcaattcgaaaaatccggaatgtctcttggtcgtgcagttcatcagaaaccgggtgatacaggacgcagcgcaggccgtcgtggggaggcagagccaaaagctatgagagatgaagctcggaccgcccgccacgaaaccgcgtcgccgggccgtgaagacctgttaggtcaagccttagctagcgctaaccttgaagccgcctggaagcgtgtcaaatcgaacagaggttccgcgggagtggatggattatctatccgtgatacggccgaacatttgaaaatgcactggcccagaattcgtgcctcgttgctggatggtagctatagatcgcagcctgttcgccgtgttcagattcgtaaaccagatggcgggatgcgtgaacttgggatccccaccgttacagatcgcctgattcaacaggcactcctgcaggttctgcaaccgcgtttagacccgactttttcggaacattctcacggctttcgtccgggacgacgggctcatgacgctgttcttgaggcgcagcggtatgtccagagtggctatcgtgtagtggtggacgttgacctggaaaaattctttgatcgcgttaatcacgacatcctgatggcccggctggctcgtcgtatcgacgataaagccgttttacgtttgattcgtagatacctggtagctggaattatggatggaggggtagtgatggagcgctacgagggaactccacagggaggaccgctgagtcctttattagctaatgtgctgctggatgaagtggatcgagaacttgaacgtcgcggtcaccgctttgtccgatacgctgatgattgcaatgtttacgtccgctctcgccgcgcgggtgaacgtgtgctggcgggcttgcgtcggctgtatgaacgcctccacctgaaagtgaatgaggcgaaaactgcggtggccccttcaagtagacgaaaatttctgggttatgctttttggtacggtccgggcggccaagccaaatgtcgcgtagctgataaagctaaagaaacatttaaacaacgtattcgcgaaatgacccgccgtagtggaggtcggtcactccctgatatagtcgagcgtttacaaacatatttgccgggttggaaagcatattttcagcttgctcagacgccaaaagtatttcacgaactggatgaatggattagacatcgcctgcgcgctgttcagttaaaacattggcggcgcgggaaaacgatgtatcgggaactgaaaacgatgggagcaagtgaaacggacgctcgtcaagtggcagctaactcccgtcgttggtggagaaattcgcgcttcctcctcaaccgtgccatgccgatagcatattttgaccgcttgggggtaccccggttgtcgtga

SEQ ID NO: 77 - DNA, 1458 bp, synthetic construct
  source 1..1458: mol_type = other DNA
atggctagcgcatggagtcatcctcaattcgaaaaatccggaatgcaagtggataaggttttcctcatgaccgataacttaagttcaacgcaatgcagaaacgaaactctgcttggggcagacgggatacgggcgagagttgcaggaccaagaccgaagggagtctcggtaaaagcgacgccatcatggacgaaagcagaccccggttggtgtaacatagagaaggtggttaacagtatcattattgacgaagcacttagtaaggttatttccaatcgtggcagtggcggggtcgaccatatcacaacagctgagcttagagattattggagcaagtacggtggtactattcgtcagaagatcgttcagggaacctatatcccccttcctgttaaacgcgtagacataccgaagccaaacggtgataagcgaatgctgggcataccatcggtaatagatcgcgtgatacaacaagctttggttaacgtcttggagcccgtatttgacccacaattctctgagtttagttacgggtttcgcaagggtcgcaatgcgcagcaagccgtactgcaggcgcagtcatacataaaggatggacaccgttgggtggttgagcttgacctgtctaagttcttcgatagagtgaaccatgacattttaatgtccagagttgcacgagtggtcgaggacaagcgcatattaaagttaattcgccggtatcttaacgcgggtattatggaagacggtatcgtaaagccgcggtccgagggagttccgcaaggcgggcctctgagcccactgatgagcaacattatcctgaccgagctggatcgtgagttggaaaagcggggccataagttctgtcgttacgcggatgactgcaacatatacgtgaagtccgaagaggctgcaaagagagttctcgaaagtgtgaccaaatatcttgaaggtggcttaaagttgcgggtgaaccgcgacaagagcggtacctttcgtccgtacgagtctgttttcttgggctactcattccaccgtcgcaactggacgcggatcgtcgttgctgaggaatcaattaagcgcttgaagaccaagttaaagattatctatcggcacagccggggtacatcccttggcaccgctattaagaagctcaaccaaatccttcgaggttggagaacgtatttcaagcttgacacgcgcaaaggattcttcgaaaagcttgacatcaacattcgcacacacctgcgagtactcatatggagagcctggaaaagaccacgcactcgggagcgtgagttaagaaaacgtggccttgacgctttcaacgcatggaagtcggcgaacaacggacggggtccctggtacaacgcacgggcgccccacatgcgcatagctattccgaacgctctgtttgtaagactgggtctttataatctgtcttcaatgggtaccgtctga

SEQ ID NO: 78 - DNA, 1332 bp, synthetic construct
  source 1..1332: mol_type = other DNA
atggctagcgcatggagtcatcctcaattcgaaaaatccggaatggtgagtctggaaaagatcttagaaccatcaaatttaactgaagccctgaagcaggttgtaagtaacaaaggagcgcctggcgtagacgggatggcagtagatgagcttgagcctttcattcgcaatcatccaggtgtgttgagccaggccatccgtgatgggtcttatagaccaagcccggtcaaacgtgtgtatattcccaaggataatggtgagaaaagacccctcggaatcccaaccgttgttgatcgcttagtccagcaagctatcgcacagaaactgtcggaggaatacgaacctaatttcagcgataactcctttggcttccgaccgaagcggtgtgcccacgacgctctgaagcgcatcgtcgataacgcgaacgacgggtatgagtatgtcatagaccttgatctggcgaagtttttcgacactgttaatcatagcaaaatgatacaggtattgtctgaaaccgttaaggatggacgagttgtttcactggtccatcgattttttcgtgccaaaattaatgacgaaggcaaaattattaaaccggccattgggatgcctcagggagggcccttatctccggtgtgcgccaacatactgctgaatgaactggaccaattattagatggccgtggtcatcggtatgtgcgctatgcagatgatatgttgcttcagtttagatctctgagagctgccgaacgtgttttcacctcagtgaaacggtttatcgaggagaagctgtttttgaaagtcaatgtcgagaagaccaagatctgtcatctgtcaaaagacgtgaaattcttagggtattcattctacaagtcgtacgacaaagatgacctggatggcaaaggtaaatggaaattagtggtgcacggcaagaaacgtcgttcttttgagcagacaatcaaaacattgcttgatcgaaaatgtccaaaaggactggaaagatgtaaagaagatttgaaactgtatttatgcggttggaccaattatttttacatgggactgtcccgttcgcggcgccaaagttatgacaaatggattcgacgtcgaatacggcagttatactggaaaatttggaaaaaaccgtccacccgcattcgcgcactgatgcaactggggattgagcgttccaaagcaaatgagtggggtaatagtagcaaggcgtattggcgtgtagccggcagctggatcttgaaacgctcacttaccaatgatgttctccagaatttggggtggatatggctgggcatagcccgcaaatggagtccgcaatga

SEQ ID NO: 79 - DNA, 1458 bp, synthetic construct
  source 1..1458: mol_type = other DNA
atggctagcgcatggagtcatcctcaattcgaaaaatccggaatggaaactcgccatggcatgaagtatcggcaactgcatattgaggattacttaggagagattcctgcggaacagggacgagggaccggtgtgtatgcacacgaatggattactggcaacccggacaccaacactgatttttggaccgataacctgttagacgctatacttagaagtgacaaccttaacgcagcctataaacgcgtcaagtcaaatcgcggaactggaggtatcgatcgcatgcaggttgacgaacttctcccatatttgcgtaatcaccgtgacgagttgatacgccagctgagagagggtaagtacaagccgaatccagtccgtcgggtagagataccgaaagaaggtaaggataaagtacgcaaactcggaattcctaccgtggttgatagaatgattcagcaggcaattgctcaggaactgacagctgtatatgaagagcagttctctgaaaattcctacggttttcgtccgggtcgtagtgcgcacgacgcgcttgaaaaatgcagagaatatgtcaatgagggctatatctatgcaataagtatggatctgcaggcctactttgatacagtgaatcattcgaaattaatagaagtactgagtagaaccataaaggacggccgcgttatttcactgattcataaatacctgaaagcaggtgttatggaagatggtggcttccacgcgaccagtgaaggtgtgccacaaggcggtccactgtccccgctctgtggcaatgttatgcttaacgaacttgataaagagcttgaacgacgtggtcacaagttcgttcggtatgccgatgattgcattgtactgtgcaaatccagaaaatcagccgaacgaacacttaaacatataatcccctatataactaaaaaactttacttaaaagttaatcttgaaaaaaccactgtttcgttagtaagcaaagtgaaatacttagggtatggtttttaccgtaataagggtaagtgtcgtatgagagttcatccaaagtcgatcagaaagatgaagaatcatttgcgtgagttgaccgtacggggcaataaatggtccaatccggaacgggaggaaaagttacgccgttacactacgggatggattaactattatagactcgctgatatgaagagcttgatggaaacaactgacgaatggctgcgtcatcgaattcgggcggtgtactggaaacagtggaaaaaagttcgtacacgctataaaattttgagaacgctgcacttaccagaatggaaagttcatgaattggccaactgtcgtaaaggaacgtggcgtgctgcgtccacgttgaattcggtactgaccaaaaccgttatcgttgatcggcttggctatccaagtatgaccgcgcattacctgaaagtccgggtgaattactga

SEQ ID NO: 80 - DNA, 1350 bp, synthetic construct
  source 1..1350: mol_type = other DNA
atggctagcgcatggagtcatcctcaattcgaaaaatccggaatgtgcgaaatacgaaaggtggaaacggacatggagctgttggaagaggtgttgagcaaagacaacttgaacaaggcatataaacaggtatacaagaataaaggtgcctcgggtgttgacggagttacggtagacgagttgtttagctacattcaagaacacaaagaggaaattctgtggaagattcgtaatagaaagtacaaaccacaaccagttcgtagagtcctcattcccaaagataacgggaagatgcgtaagctggggataccgtcagttatagatcgagttatccaacaagctatcgtgcaagttctcacacctatttatgaagagcagttctctaaccatagttacgggttccgtccaaaacgttcatgcgaaatggcagtagtgcaagccctggagtacttcaacgacgggtatgactggatagttgacatagacctgcaatctttcttcgacgaggtaaaccaggacaagttgataggcatcattagacgaacgattaaggacggtgaccttgtatccttgatccgtaagttcttacaatctggtgttatggagaatggagtactgcaaccgaccaagaagggtacacctcagggtggaaacctttcccccttactctccaacataatgctgaacgaactggacaaggagctggaagctcgacgcctgcactttgtcagatacgcagatgactgccttattttggttaagtcggagaaggctgccaatagagtaatggagagtataaccaagttcattaccaagaagcttggtctgaaagtcaatgtggagaagtccaagattgccagaccggacgacattaagtaccttggtttcggtttctacaagaagatcaatcaaaatgagtggcgcccgaaaccgcacataaagtcggtacagaagttcaagacgaagctccgtgacattcttgttcgtagccgttcaattagtctcgacgatcgactgttgcgccttaagcagctcatttacggctgggtcaactactttcgtatagcggacatgactattttgcttagagacatagacggtaacattcggcgcaagcttcgggttattatctggaagcaatggaagaagattaagaaacgctacgcgtgtttgagaaaactcgaaataacacatagagatgcttacgtgacggctaactcacgatcaggttactatcacatctcccatacccgcgttttggaaaaggctatttccaaagagagattgaataagcggggccttgtgaactcgttggattattatctgaaagtccacatcatcacgaattga

SEQ ID NO: 81 - DNA, 1434 bp, synthetic construct
  source 1..1434: mol_type = other DNA
atggctagcgcatggagtcatcctcaattcgaaaaatccggaatgtcgaaggcgatgcgtcagatgccggggcagcctggtcgtgtgtgcgtcgcacatggtgaagcagtgcgcgatttaatttctgacgaagccggtggaccccctcgcgaacatccggataccggctcagcaacgcctcccactggaccaggcggtttattggcagctatgttaacccgtcaaaacttgcagctggcctggaaacgggttaaggccaacaaaggtgcagctggcgtggacggattggacatagaacagactgcgcagaccctgcggacgcgttggccggatattcgccagtcattactgcaaggtcggtatcgtccttcacctgtgcgaaaagtgatgatcccgaagcctgatgggactcaacgtgagttaggaataccaactgttacagaccgtctgatccagcaagcacttttacaggtgttacagcctctgattgacccgaccttcagcgagcactcgtacggctttcgtccaggccggcgcgcgcatgacgcggtaaaagctgcacgtgcttatgtccaatccggaaagcgtgttgtagtggacgtcgatctggcgaagttctttgatcgggtgaatcatgacatactgattgatcgcttgaatcgtcgagttgatgatgctggcgtcatccgtcttgttcgagcttatcttaacgcaggaatcatggacgggggtgtggtggtcgaccgtcacctgggtaccccgcagggagggccgttaagtcctctcctggcaaatgtgttacttgatgaggttgacaaagcgctggaagcacgtgggtactgcttcgctcgttacgcagacgactgtaatgtctatgtaggttctaaaaaggctggcgaaagagtaatggcctatccgtacttgcgtcgattatatgtcaatcttaaactgcaaataaatgaagccaaatctgccgtagcttcagcgtttggacggaaattcttaggatacgcgttatgggtcgctaaagggcgtgaagttaagtgcaaagtggctcaaaaacctctccaaaatttcaaggcgcgcatccgtcaactgacgcgtcgcagcgggggtcgttctatggcccaggttgtcgataaattgcgcccataccttttagggtggaaggcatattttggtatggcgcaaacaccgggagtctggcggggcctggacgagtggctgcgtcatcgtctccgggcaattcaactgcgtcaatggaagcgacctaaaaccatacatagagagctgaaagcactgggtgcatcagacgacgtcgctaaacaggtggccggtaattgccaccgttggtggcgtaattcagatggagttatcaagcgtgtcttagcgattgcttattttgatcgtctgggtgtgccccgtctgtcatga

SEQ ID NO: 82 - DNA, 1395 bp, synthetic construct
  source 1..1395: mol_type = other DNA
atggctagcgcatggagtcatcctcaattcgaaaaatccggaatgcaacaaaagacgtacagagatccggatgcgggaagacgcggtgaagctcctgacgccggcagccaaggcgcggagactgtacaggcccctactacccgtgagtcaccgagttcaacagcgtggttgatggaagccatatgtgaaccggtaaacctgcggcatgcactgaaacgtgtcaaggctaataaaggtgccgcgggggctgatggcatgagtgtgtcagagttgcccgactacttacgccatcattggcctgaactgaaagcccagctgcttagcggtagttatcgtccgtctcccgttagacgtgttaccatacccaaaccggggggaggcgaacgtctgctgggcatacccacagttgttgatcgttttatacaacaagcaatgatgcaggttctgcaggcacagtgggatgcaacgttttctgattccagctatggattccgcccaggtcgcagtgctcaccaggccgtgaaacaggcacagaaatatatcgagtctggatatagttggggtgtggatcttgaccttgaaaagttctttgaccgcgttaaccatgacgtcttaatgtctcgcatcgctaagcgcgtgagcgataaacgggtgttaagtttgatccgaggctaccttaatgccggtgtgatggaagcgggccttgtgatgccagtaactgagggcaccccgcagggaggacctctgagcccgctgctttcaaatttgctgctggatgacttcgataaagagctggaaaaaagaggtttgaagttcgcacgctatgctgatgattgtaacgtgtatgtcaaatcggagcgagccggaaatcgcatgatggcaggtttaactcattggttaaatcgtaagctgaaacttaagctcaatgctaaaaaatctgcggtggcactgccagaaacccggaaatttttgggttattcatttcgccgcggtcgaaaagtttggtgtgtcgtttcgcctgaaagcgtaaaacgatttaaaacccgtattcgggagctgacgggtcgtaataccggtaagagcttggaacagcttatcgaaccgttaaaacggtatttaaccggttggaagtcatattacggactgaaccagtggcagacattaatgcgggaccttaatcgttggattagacgccgtctgcgatctgtcctgtggaaacagtggaagaccggctcgaaacgttttaaagaattacgtcgaagaggagttagcaaggatcttgcggcacagacagtcggatcttgtcataaacagtggcgcataagctgctcccctgccttgtcaattgccttacccaatcgtttgtttgtccgactgggtttgccagaactgtga

SEQ ID NO: 83 - DNA, 1452 bp, synthetic construct
  source 1..1452: mol_type = other DNA
atggctagcgcatggagtcatcctcaattcgaaaaatccggaatgcgttcgcaggaggggcggagacaacaaaaagcccccgaaggggcctacctgtgggaggaaatggtcaaaccatggggtactacgggtggtccgtcaccgtcatccgcacaaggtggggccactccccgaggaggtcagggcagcgggttaatggaacaggttgtggaacgcagcaatatgctggctgccctccgccgcgttgaacgaaacggaggggccccaggcgtcgatgggatccctactgaacgcctcagagatcagatccgtgcggaatggccgcgaattcgtgaagaactgctggccggcacataccgtcctaaacccgttcggcgcgttgaaataccgaaacctggcggaggtaaacgtttacttggaatcccgacggctgtagaccgcttgattcaacaagcacttctccaggttttaacgcccatatttgatcctcaattttccgaggcctcctatggtttccggcctggacgccgggcccatgatgccgtgcgaaaggcccgtcagtatgttgaagaaggatacgaatgggctgtcgatctcgacatcgagaaatttttcgatcaggtaaatcatgacatactgatggcacgtgtagcacgcaaagtgacagataaacgtgttctgaccctgattcgtcgttatctgcaggcgggggttatggtcaatggtgtcgtcatcgaaacaggtgagggtacaccacagggtggtcctttgagcccactgttggcaaatattcttctggatgatttagataaggaattggaaaaaagaggccacaagtttgttcggtacgctgacgactgtaacatatatgtgaaatccaaacgggcaggggaaagagttatggcgagtatccgtaagtttctgcaggaaagactcaaactgaaaataaacgaacagaaatctgcggtggatagaccgtggaagctgaagttcttaggattttcgatgcataagcgcaagaccggtgaaatcctgatacgcctggccccccaagcaattgaaagagttaagggaaagatccgagaaatcaccgctcgcaataaacccgtatctatggcggaacgtatagaacgacttaacacttacttgggtgggtggattggatacttcgccctcgcagaaacgccgtcggttttcgaggagatagagggctggatgcgccgccgactgcgtatgtacctttggaaacagtggaaacgcgtgcggactcgctatagagaactgcgtgccctcgggttgtccgaatgggttgtgcaccagttcgctaatgcacgcaaaggtccttggcgcatggcccatggcccgatgaatcgtgcgctgggcaatgcctattggcagtctcaggggttaatgagtttaaccgaacggtatcagagtctgagacaagcctga

SEQ ID NO: 84 - DNA, 1422 bp, synthetic construct
  source 1..1422: mol_type = other DNA
atggctagcgcatggagtcatcctcaattcgaaaaatccggaatggtaaagcccttacgccttgatcgtagagctgaaagatcaccgacgccgtcagaaggaatgtctgaggccgttggggaaggagtctgggaacaggtattcgagcgcaagaacttactgtcagcactgaagcgcgtcgaggccaatggtggagcccctggggttgacggcatgactgttgaagcgttgcggccctacctcaaggctcactggctggagctgcgtgcagcattagacagcggtaactaccgtccctcacctgtgcggcgtgttgagatagggaagcccgatggtggagtacgcctgctggggataccaaccgttgtagacagattaatccagcaagccatcggtcaggtcctcactcctttgttcgaaccggtgttttcacctcattcctacggattccgcccaggtcgccgtgctcaggacgctgtggaagcagctcaagggtatataagagagggatatacgtgggtggtagatatagaccttgagaagttcttcgaccgagtgaaccacgataaattaatggcaagagtcgcccgcgcagttaaagacaagcgtgtattaaagctgatcagaagatacttgcagagtggggtaatggtcaatggtgtggtgatggagacggaagagggaacaccacaaggtggtccgttgtcgccgttactcgcgaatattatgcttgatgacctcgataaagaactggagcgtcggggtcaccgatttgtgcgttatgcagacgactgtaatatatatgtgcgtactgagcgggccggcgagcgtgtcatggacagtgtgcgaggctttcttgagaagaaactcaagttgaaggtcaacgagaagaagtcggctgtggcccgtgcgggtcagcgtaaattcttagggttctcctatttctaccgcaagggagaagttctgattcgtgtcgctgagcaagcgcaacaacggcttcgagaaaagttacggggcctgacgcgtcggactcggtcaggccgtctggaagagataattcaacaactcaaggaatatatgcgcgggtggatgggttatttcagactggccgacacccctagtgttttcgcgggattagatcactggctgagacggcgcctgcgtcaactgctgtggaaaagatggaagcgtgggactacccgttggcgtgagcttgttagtctgggtgtccctcggcgccttgcgggactcggagcgacaggaagttcaccttggcgtatggccggcactccagttgtccacatggctctttcgaatgcgttttgggatgcacaaggtctttgcagtttcacggagtactaccaccaactgcatttaccaagacgcactgcgggttgcggtcctgcatgtccggtcgtctga

SEQ ID NO: 85 - DNA, 1413 bp, synthetic construct
  source 1..1413: mol_type = other DNA
atggctagcgcatggagtcatcctcaattcgaaaaatccggaatgggtgaagttagagttaaaccggggggtactccgcgtggtcgttctatagatcgccaggatttaaaattaatcttaagacgggaaaagtatcgtatggaccttatggagcaaatgctgtcgcgagagaatatgctgcaggcattgcgtcgcgtagaagcaaacaaaggagcagcaggaattgacagtgtcagcactcgccagcttcgtgcacatgtggtccagcattgggaaactacaaaagcaaaacttttggcgggtacgtataaaccaagcccagttcgccgcgtcgagattccgaagccggacggaggcgtccgtctgctgggtattccgacggtcatggatcgtttgattcagcaggcaatcttgcaggttctgacccctatatttgacccgacgttttccccacactcttatggttttagaccgaaacgtcgtgggcatgatgcagttcggcaggcccaggaatatatacgagaaggttatagatatgttgttgatatagatctcgagaaatttttcgatcgcgtgaatcacgatatcctgatgtctcgtgtagcgcgtaaagtcaaagacaagcgtgtgttaaaactcatacgggcttaccttaaagcaggcattatggcagaggggattcgagtgcgcagcgaagaaggtactccgcagggtggcccgctgagtccccttctggctaatattctcttagatgatttagacaaggagctcgaacgccgccagcttagattcgtacgttatgctgatgattgcaatatctatgtcaaaacccgtcgggcgggtgagagagttaaacggtccattacaaagtatttggaaaaaaaactgaaactgaaggtaaacgaggcaaaaagcgctgtggatcgtccatggaaacgcaaattcttggggttctcatttacatttcacaaagaagctcggattcgaatcgcgcccaaatcgctgaaacgagtaaaagacaaaatccgtagtctgacgagaggcaaccatttgacatcaatggaaactattattgaagacttaaatcgttatctcatgggatggatgggttattacgcgcttatggacaccccatcaactctgaaagcattggacgaatggatacgacgcagactgcgcttagttttatggagccgctggaaacgcgtacgtacgcgttaccgtatgttacgcgcactgggtctgccagaacgtgatgtgcataaactcgctaatacacgcaagggagcatggcggacctcaaagactccacagatgcataaggcactgggaatcgcatattggaagagtcagggcctgatgtcgctcactgagcgttactttgagatcagacaaggctggagaaccgcatga

SEQ ID NO: 86 - DNA, 1404 bp, synthetic construct
  source 1..1404: mol_type = other DNA
atggctagcgcatggagtcatcctcaattcgaaaaatccggaatgaaagagacaaaaaaatgcgatgaatctcgtcagctgaacatccagacgggccaccttcaaaaagatcgcgtcgaattagagagctatgccaaagcgccctccattagtgtgaccagtgacaatcgccagaatgctcgccgtgagtgtcattacggactgttggaaaatattataagcagtgaaaatctgaacgaggcatttaaacgtgttaaaaaaaataaagggtcacacggtgaagaactgagacagagtattgcggacggcagctataaacccaatccggttcggcgagtcgaaatcccaaaggataacggtaaaattagaccccttggtattccaacggtggtagaccgcgttatacaacaggccatttcacaagtgttaacacctatatttgaaaaaaaattttcggaaaatagctacggcttccgtcccaacagatccgctcatcaagctatccttaaatgtaaagagtatatggatgaaggctatcgttgggcagtggacattgacctggaaaaatatttcgatacggttaatcatgataaactcatcggactgatttacaaggaaataaaggatattagagtaataggacttatacgcaaatatcctaatgctggcgttatggagaaaggccttacgtctttgacccttgagggtgtgccgcagggggggaacctcagcccgttactgtctaatattatgctcaatgagctggatatggaattagaaagacgcggtcttcggttttgccgatacgcagatgactgtaatgtatatgttaaatccaaaaaatcagctgagcgtgtgatgaagagcattacaaagttcattgaaaaagatctgaaactgaaagtgaacaaagagaaaagtaaagtagatcgaccttggaaactgaaatatctgggctataccttttataccaaaaaaggagaaatggggattcgtgtacatcaggtatcaatcaagaaactcaaaggtaaattaaagagtatcacagggcgttccaatgccatgtccatggaactccgcgctgtgaaactgaagcagttgattgtgggttggattggctattttaaattagctgatatgaaatccactttacgcgaacttgatgaatggctgcgacgccgtcttcgcctgtgctattggaagcagtggaaaaaaatcaagactaaacatgacaaccttgtgaagttaggcgttgaaaattggaaggcatgggaacatgcgaacacacgcaaaggctattggcggatttctaactcgccgatacttgccaccaccttgaccaacaaatatctgcgcgaacaggggtttatcacgctctcagaacgttacagccaggtgcgctga

SEQ ID NO: 87 - DNA, 1410 bp, synthetic construct
  source 1..1410: mol_type = other DNA
atggctagcgcatggagtcatcctcaattcgaaaaatccggaatgagcatgtgtgaagctctgagacagatgccggaacgctcaggacgtgtccctcttgcagatggcgaggcaggtcgggcctccgcgtctgatgaagcgacacgaccccgacatgaaaccggaagcacaggttccgccttactgatggcagctctgactcgtgaaaatctgcagcaggcatggaaacgtgtgcgagcgaataaaggtgccgcaggggttgatgggcgcgacattcctgaaacagcctgttaccttcgaaccgcttggccggtgattcgtgatcagctgctgcagggtacttatcgaccttccccggttcggcgggttactattccgaaacccgacggaggggagagagaactggggattccgacggtgacagaccggctgatacagcaggcgttgcttcaggttttacaacctttactggatcccacattttccgagaattcatttggttttcgccctggccgtagtgcccaggaagccgttgtccgcgcacaagcatacgtccagagcggccgtcgtattgtcgtcgacgtagaccttgagaaatttttcgatcgtgtcaatcatgacatcctcttgggtcgtctgcagaagcgtattggggatgccggtgtgctgcgcctgattcttgcttatctgaatagcggtatcatgcagaacggtgttgtcgtatcgcgctatcaaggcaccccacagggggggccactgagtcctcttttagccaatgttcttctggacgaagttgataaggagcttgaacgtagaagtcactgttttgttcgctacgcagatgatgctaatgtttatgtccgtagtcagcgcgctggcgaacgcgtaatggcccttctgcggaaaatgtatgccaaactccaccttaccgtcaacgaggcaaagtctgcggttgcatcggctttcggacgcaaatttttaggattcagtttttgggtcgcaccgcagggcgaaatcaagtgcaaagtggcagcaaaaccgatggcgacttataaacaacggatccgtcagctgacgcgacgctcggggggacgtagcatggcagaagttgtagagaatttgcgcccgtacgttttggggtggaaagcgtattttcgcctttctcaaaccccgggcgtgtggcgcacgctcgacgaatggatgagacatagattgagagcaattcagctgaaacattggaagcgtggccccacaatgtatagagaattaaaggctcttggagcatcagaaaccgttgctcggcgtgttgcggggaatgcacggtcgtactggcgcaatgccgaccggttattgaagaccattctgaccatagcctactttgatcgtcttcgcgttccacgactgtcatga

SEQ ID NO: 88 - DNA, 1302 bp, synthetic construct
  source 1..1302: mol_type = other DNA
atggctagcgcatggagtcatcctcaattcgaaaaatccggaatgatgatggaacaagtcgtatcgcggcagaatatgcttgcggcttaccaaagagtggttcgcaatcatggatctgcaggcgtcgacggcgtgactgtggaggatttagccgaatactcccgtctgcattgggagcgcattcgtaccgaacttctggaaggacgctatcagccgcaacccgttcggaccgttatgatacctaaaccgggaggcggggagcgggaactgggtataccgacagttatggatcgaatgatacaacaggcagttcaccaggttatgagtccgcagttcgatgcgggatttagcgaagcctcctatggctttcgacctggtcggtcagcgcatggtgctgtggagcgcgcacgcgaacacatgaccgcaggtcatcgctgggttgttgatattgatttagagcgcttcttcgatcgcgtcaatcatgacgtcttaatcgcgcgggtttcccataccgtaaaggataaacgtgtcttgcgccttatcgggtgctatctttcagcaggtttaatgcagggtggggtggtttcaccgagatcggagggcactccacaaggcggaccactgtctcctcttctgagcaatattttgctcgacgtcctcgataaggagctggagcgtcgtggccatcggtttgtcagatacgcagatgattgtaatgtatatgtgcagtcccggcgggcaggtgagcgggtgatgggctcgctccgtgtatggctggaaaaaagactgcgcctgaaaataaatgcatccaaatctgctgtcgatcggccttggcacagaaaattcctgggttattctgtcacgacgcaaaaacgaccgcgtttaaaagtgtctgctgaatcagttaaacgcatgaaacaacggcttcgtgagctgctgcgcattggtcgcggcagatcacttcgtactgtcattgccactgttgccgtttacctgcgtggttggctggggtattatcgtaaagccgaagttcgcaatgtttttgaagatctggatcagtggcttagaagaaaattgcgtcgcataatgtggaaacaatggaaaaaacctaaaacacgttatcggaagctgcgtgcgtatggtgtagccccggatcaggcgcgccgttctgcatggaacggacgaggtccgtggtttaatgctggtgcatcacacatgcatcttgccgttccaacgaagctgctgcgtaactggggattaccatcactgcttgatgaacatcagcggcttcagagactgtga

SEQ ID NO: 89 - DNA, 1497 bp, synthetic construct
  source 1..1497: mol_type = other DNA
atggctagcgcatggagtcatcctcaattcgaaaaatccggaatgatctccatgcaaaccgtcaaagccgaagtaagtgaacgggccgccgagacgcaatcgacggaccgaaagagtacaaagctgccactgggcgctgacgttggcgccgccacgagtgagcaaacaaagtctgaggggcattctcttatggaacaagtagtcgaacgctcgaatctctggttagcgtatcaacgggttgtccgaaataagggtgcgcctggggtggatggtttaacagtaggcgaattcaaggattggctgaaaatgcactggccaagtgttaagaaagcacttctggaaggtgattacctgccccggccggtacgacgggttgacatcccaaaggccagcggcggtatgcggactcttggggtacccacagtcgttgaccgtctgattcaacaagctctgcatcaagttctgcaaccgctgttcgaaccgacgttttcacaaggttcgtacggttttcgtccccgtcgcaccgcccaccaagccgtacgtcgtgcccagtcatatattcgtgagggcaagcgttgggtggtcgatctggacttggagaagttctttgaccgtgttaatcatgacgtccttatggcacgggtggcgagacaagtcagagacgcgcgcgtgttgaagttaattagacgcttcctggaagccggaatgatgcgcgaggggttagtcgagccacggagcgagggaacgccccaaggtggccctctgtcacctttattgtcaaacattctgttgacggatctggaccgcgagttagagagacgaggtcttgcgttctgccgatatgccgacgattgtaacatatacgttggctcacgtgttgctgcagagcgtgttatgggtggtattagaaccttccttgaagaggttttacgactccgtataaatccagcgaagtcagcggtggcgcgtccctgggaacgtaagttcctcggtttctcgttcactgctcagagagaagcccgcttaagaatcgcactccaatccgtgcgtagattgactgaacgtgttcgggagttattaagagctggccggggtcggagtcttgcccatactattgacactctcaaccctttactgcggggatggatcagctacttccaattgactcagtgtaagggtgttttagaggagcttgacggttgggtacgccgcagattgcggtgtgttctgtggcgacagtggaagcgtagccgcagtcgtgcaagacacatgcgggccttgggtttagacgctgcccgcgcacgatgtagctcacaaaatgggcgtggcagttggtggaatgcaggggcaagccatctgcaccaggcccttccggcagcttacttcaaattaggtgcggggttagcagtagctagagccactgccactccggtttgcagtctgaatcgtcgcatgcgcaatagaacgtctggcggagtcggcggtcgacgtgcatga

SEQ ID NO: 90 - DNA, 1446 bp, synthetic construct
  source 1..1446: mol_type = other DNA
atggctagcgcatggagtcatcctcaattcgaaaaatccggaatgaaagaagggaaacagaagatttcgaaagacacctgtcaacagaaagatcgcgcggagcccgatggctatgcgggcgggcagacattcatctggatgaccgaaaataacattactaatgtcgacaactcaaagtacggtttacttgagtacattttgtctccacaaaacctgaacgcggcctttaaacgtgtaaaaagtaataaaggttccggtggcattgacaaaatggaagttgaatcgctgggcgactaccttatttgccacaaagaatccttgatccagagcatcttagatggtaactaccggccgaatccggtccgccgcgtggatatcccgaaagataatggtcagaaacgcagcctcggtattcccacggtggtcgatcgcgtggtccaacaggcgattgcgcaagttctgtcgccgatctatgaaaaacaattttccccaaattcttacggctttcgcccgaaacgtagcgcccaccaggctttaatcaagtgtaaagaacatattacctcagggtataagtatgccgttgacatggatctggagaaatttttcgacacggtgaaccagtcaaaactgatcgaaattctctcccgtaccgtgaaagatggccgtgtggtatctttaattcataagtacctgcgcgctggcgtggttgttcgtaataagtttgaagagagtaaaatgggagttcctcagggcggcccgctgtcgccactcttgagcaatatcatgctgaacgaattagatgaagaactggagaaacgcggtcaccatttcgttcgctatgcagatgatatgctgatcctgtgcaaaagtattcgctctgcgaaacgcactaaagcaacgattattgcatacattgaaggccgcctcttcctgaaagtaaacaaggacaagacctgcgtggcctatatcagcaaaatcaagttcctggggtatagcttttacgtcaataagaagaaaggtcgtctgcgtctgcatccgaaaagtctggccaaaatgaaagagaaaatccgtgctttaactagccgtagcaatggatggggcgatgcgaaacgtaaacttgagctcaaacaatacatcaccggatggcttaactactttaagctggccgacattaaaagtctgctgtcgcgtattgatgaatggtatcgccgccggctgcgtatggtaatttggaaacagtggaaacgggtgcgttcacgtggccgcaacctgattaaacttggtattgcaaagtataaagcgtgggaatatgctaacacgcgtaaagcctattggcggacctctaacagccctatcttgaacacatccatcacgaatgaacgtttgaaacaggcagggtatattttctttgcggattattatcgcaaagtgaacggtgtcaattga

SEQ ID NO: 91 - DNA, 1440 bp, synthetic construct
  source 1..1440: mol_type = other DNA
atggctagcgcatggagtcatcctcaattcgaaaaatccggaatgaaagggcgtatgcagaaaatttctaaagatacttggctgcagaaagaccgtgctgagccggatagctatgctgcggggcagacctttatgcgtattacggagaacaatctgactgatgtgaccacgttggaagatggattgctggagcaaattctgtcgccatcgaatcttaatcgcgcctataagaaggtgcgtagtaacaaaggtaaaggcggcgtggacaaaatgggtattgaacacttgcaagactatcttgtagagaatcgcgtggaattactgcagtctatccgcgatggcaagtatcgtccaaaaccggttcgtcgtgtcacgattccgaaagagaatggtaaaaaacgtctgttaggtctgccaaccgtagtcgacaaagtgattcagcaggcaatcactcaggttctcagcccgatctacgaaaaacagttctccgcatacagctacggctttcgtccggggcgcaatgcccatcaagccctgaaaaaatgccgtgattatatttctgatggtcatatctacgcggtggacatggatctgcaggaatttttcgataaagtaagtcacagccgcttggtagaaattctgagccgtaccatcaaggacggccgcgttatttctctcattcataagtatcttcgcgccggcgttatgattggtaataagttcgaagaaacggaactcggtgtcccgcagggcgggcccctgtcacccctgctgtccaacatcatgttgaacgaactggacaaagagctgcaacgtcgcggtcaccgcttcgtccgctatgcggatgatctgatgatcgtgtgcaaaagtaaacgtagcgcgggccgcacccttcggaacatcatccctttcatcgaagataaactttttctgaaagtgaaccgcgagaaaaccaacgtgagtcatgtttccaaaatcaagtttcttggacacaccttttatcgttcacatggtaaaggccgtttccgggcacatcctacgtcgattcggaaaatgaaacagcgtttaaagcaattaacatcccgttcgaatggctggggcgaagatcaacgcaaggaaagcttaaaccactacgttcgtggatgggtcaactattttaagatggctgacatgaaatcattactgcggaaaatcgaccgctggtaccggcgtcgtttgcgtatgtgtatttggaaacagtggaaacgcatccgcaccaaaggcaaaatgctgattaaactggggctgaacaaatggaaagcatgggaatacgccgatacccgtaagagtcactggcatattgcgaatagctttattctcacacgcaccattactacacatcgtctccgccaggcgggttacccgtttctgctggattattattcaaaagttcgcacgtga

SEQ ID NO: 92 - DNA, 1455 bp, synthetic construct
  source 1..1455: mol_type = other DNA
atggctagcgcatggagtcatcctcaattcgaaaaatccggaatgcgtggcgtgaaacccaccatggaaaagaaactgaccaaaatgaaagtttctaaccagtctggctacaccggtttttcgattttcagcttgggggagatttgtttagaagaagttactgatggttataatctggagaaggcgttgaaatgtgtggcgcgcaataaaggtgccccgggcatggatggagtcgaaaccaaagattatgccctgcatcggcaaattgccggttttaaagatcttatcgacgatatttccgccggtacatatcgtccaaaaccggtcaaacgggtgtatatccctaaagaaaacggcgataaacggccgctgggtattcccacagttgaggatcgtgtggtgcagcaggcactggccaacattctgagcaagtattacgaagaggaattttcagacaacagtttcggctaccgcccgggccgtggttgccgtcaagcggttaaacgcgctttgaaatatgtaaacggtggccgccagtgggtaatcgaccttgatctgtcgaagttttttgacaccgtcaaccactcaaaactgctgcagatcctttcagagaaaatcaaagatgggcgcgtgatttcactgattcataagtttctgcgcactccaatctatgaaaatggggtggtaagcccgaaaagtaaacaaggtaccccgcagggcggaccggtatccaccattctcgcgaacattatcctgaacgaatgcgaccagatgatggacaaagaaaatattaagtttgttcgctatgcggatgacatgatgatcttttgcaaaagtaaagaagctgccgaacgcaccctgaacaaggtgacaaagttcttagagaaaacgctcttcctgacggtcaataaagaaaaaaccaagatcttatggtacacgcatgggacacagtttttgggtttcacgttgtcccagtatgtgccaaaacacattaagaaaatcgcaccgaaatgtaaagtttacgttaaagtccatccgaaaaaacgtgagaaatttcaaaaaggcatcaaagaaaccctggatcgtcgcgcaccgggcgggattgaagaaacgaagaaaaagtttaaccaaaaaattcggggatggttcaactacttcaaaggcagcattccacagaagtggatggaagagacggatgcatggatgcgtcgccgtatccgtcagatgtattggaaacaatggaaaactcctcagaatcgtatggaaaatttcagcaaacttaatcccaaaagtccttctcggcgtgattacgcgtactctaacaatagctattggcgcatggctcgcacgaaacagatgcacaatgcactctcgaaccgtaccctcactagcatgggctggctgtcgttacaggaactgaacgcgcagtacctgcaagagatgtccggaaattga

SEQ ID NO: 93 - DNA, 1317 bp, synthetic construct
  source 1..1317: mol_type = other DNA
atggctagcgcatggagtcatcctcaattcgaaaaatccggaatggagctgttagaacagattctgagtaatagtaaccttaacgaagcctacaagaaagtttatcgcaataagggggcgtctggagtagatggcgtgacaatcaatgagttgaaagaatatcttcagaataacaaacacaaacttctctctgaaattcgtgcacgtaagtataaaccgcaaccggtgaaacgtgtggaaattccgaaagcatccggtggtgtgcgcaaactcggcattccaactgtggttgatcgcgttatccaacaagcgatcaatcaagtgttaacgccgatctacgaggagcaattttccgaatccagctacggctttcgccctcgccgtagcgctcagggcgccgtcttacgttcgctggaacttattaacgatggttacgattgggtggtggatatcgacctcgaacgttttttcgataccgtccatcatgaccgtctgatgaatatcatttcccggactatcgaagatggtgacgtgattagtctgattcgtaagtttttagtaagtggtgtaatgattgacaacaagtatgaggataccatcattgggacccctcagggtggtaatctgtcacccctgctgagcaatatcatgctgaacgagctcgacaaagaactggaaattcgtggcctggattttgtccgttacgcggatgattgcatcattctcgtatcgtcaaaaaaatcagctaatcgtgtaatggcaagcgttaccaatttcatcgaaaaaaagctgggcctgaaagtgaacgtcacaaagagtaaggttgatcggccgaacaacatcaagttcttgggctatggttactattatgacggtaaagaaggaaagtatcagttgcgcccgcacgaaaaatctattcagaaattcaaacggacgttaaaacgtttgaccaaacgctcgtggtcggtgtctctgaactatcgcctgtttaaaatccgccaggtcattatggggtggatccagtactttaagtatggcaaaatgaaaagcaaacttaaagttatcgacagcaaactgcgcgcccgcattcggattgtcatttggaaacaatggaaagttccaaaaaaacagatcaactcactgatgaaactgggcatcagcttggacgaggccaaaggcattacgtactgtcgtaaaggctaccagttcatcggacactcgaaagttatccagaaggcgattaacaatagccgtctgaaaaaacgcgggttaacgtccgcgctggatcattatctgaaagtgcagaccgtcatttga

SEQ ID NO: 94 - DNA, 1317 bp, synthetic construct
  source 1..1317: mol_type = other DNA
atggctagcgcatggagtcatcctcaattcgaaaaatccggaatggagctgttgacccagattttgtccaacagtaatctcaacgaagcatacaaaaaagtctatcgcaatcagggtgcgagcggggtggatggtgtgaccattaacgagctgaaagagcaccttcgtgagaataaacacaaactgctcagcgaaattcgcactcgtaagtataaaccacagccggtaaaacgtgtggaaattcctaaagcgaacggtggtatccgcaaacttggaatcccaacggttgtcgatcgtgtcattcagcaagccatcaaccaggtgctgacccctatctatgaagagcaattttcagatagtagctacggtttccgcccgttgcgtagcgctcaaggtgcggtcttacgctcattagaattgattaatgatggctatgattgggtggtggatatcgatctggaacgcttctttgatacggtacatcatgaccgtctgatgaatatcatttctcgcaccattaaagatggcgacgttatctcactcattcgtaagtttctggttagtggcgttatgattgacaataagtacgaagacacgattattggaacgccgcagggcggcaatctgtccccgctgttaagcaacatcatgcttaacgaactggacaaacaactggagatccgcggcctgcactttgtgcggtacgccgatgattgcatcattctggttaaaagtaaaaaaagcgcagaacgtgtaatgacttctgtgacgaactttatcgaaaaaaaattaggcctcaaagtcaacgcgaccaaaagtaaggtcgatcgcccgaataacattaagttcttgggatacggttattactcggactttaaagaagggaagtatcagctgaagccccatgaaaaatcgattcaaaaattcaaacgtaagcttaaacgtttgacaaaacggtcgtggtccgtttctttagactatcggctgctgaaaatccggcaggtaattatggggtggattcagtactttaagtatggtaaaatgaaaacaaaactgcgtggtattgactctaaactgcgcgctcgcatccgtgttgtgatctggaaacaatggaaggtgccgaagaagcatatctcatccttaattaaactcgggattctgaaagatcaggccaaaggcattacctattgccgtaaaggctatcagttcatcggccatagctgtgtaattcaccgtgcaatctccaattcgcgcctgaaaaaacgcggcctgactagcgccctggatcattaccttaaagtgcagaccgttatttga

SEQ ID NO: 95 - DNA, 1314 bp, synthetic construct
  source 1..1314: mol_type = other DNA
atggctagcgcatggagtcatcctcaattcgaaaaatccggaatggaattactggacaagattttggaacgggagaacctcaacaaagcatacaaacacgttaaggcaaacaaaggcgccccgggtgtggatggagtgactgttgatgaagcatatgaaaacattcgccagaataaagaaaaatggctgcatcagattcgtaaacgtacctacaaaccgcagcctgtgcgtcgtgttcagattccgaaagaaaacggtaaaatgcggaatctgggcattcccactgtgtttgatcgtattattcagcaagcgatggtacaggtactgagcccgatttttgaagagcaattttccgaaacctcttacggcttccggccaggacgctgttgcgaaaacgcggtggtaaaagcattagaatatctgaatgatgggtatgaatggatcgttgatatcgatttggaacgcttcttcgataccgtggatcaggatcgtctgatcaatattatcatgcgcacgatcaaagacggagatgtggtgtcgctgattcgcaagtatcttagtgccggcgtaatggacaaaggcgtcaccaaagcgaccgagaaagggacgccgcaaggtggcaatctgtcccctttactgagcaacattatgttaaacgagctggacaaagaactcgaagcgcgtggcctgcgcttcgtccgttatgccgacgattgtattatccttgtcaaaagtgagaaagctgctaatcgcgtgctggagtccatcacgaagtacatcgaaaagaaactgggtctgaaggttaatgctgaaaaatcgaaagtgacgcgtccgacgaaaacaaagtatctgggttacagcttctggaaagatacaaaagggaagtggaaacccaaaccgcacttgaaatcttatcagaaaattaagcgtaaacttaagcagctgacctgccgccgtatttcaatctcacttgacgaacgcatcaagcagattaattacgcgattcgcggctgggtcaattattttcgtatcgcaaacatgaaaaatgcgatccaagagatcgacgagcacctgcggactcgtgttcgtgtgatcatttggaaacagtggaaaaaagctagtcgcaaagaaaaagccctgttacaactgggtgttaaaccagatattgcccataaccttgcgaacaccagcaaaggctatcaattggtcgccaaaaccgactggctcaaatttgcgatcaacatcgaacgtctgcgcaagcgcggtttgatttttctcagcgatcagtaccagaaagttcatgtcgagatttga

SEQ ID NO: 96 - DNA, 1434 bp, synthetic construct
  source 1..1434: mol_type = other DNA
atggctagcgcatggagtcatcctcaattcgaaaaatccggaatgaatgcggaaaatctgattgatgaatcatgtcctcaacgtacgagtgcggaacatgaaaaatacgccggggcgcagtccgccgccccgcgtgaaagcgaagctgaagatcgcgcggacctgctggagcgtatccttgatcgcgacaatatgaatgaagcgtttaaacgcgtgcgcgcgaacaaaggcgcgccgggcatcgatggtatgaccgttgaggctgccttaccctggctgatcgagcatggtaaagaactgattgacagcctgcgtgacggcacctataaaccgcagccggtgcgccgcaaggaaattccaaagcctgatggtggcatccgtaaactgggaattcccaccgtgattgatcgcatgattcagcaagccatcacacagcagctgaccccgatctacgaaccgatcttttctgacaacagctatgggtaccgtccgcaccgcaatgcgcagatggcgatccgcaaagcaaaagagtatgcagacgaaggctacaccgtggccgtcgaaattgatctgaccaagtattttgacacgctgaaccacgatctgctcatgaacactgtccgtgaagaagttaaagacaagcgcgttctcgagttaattaaaaaatacttgaaatcaggcgtcatggctaacgggctgctgatcaaaacagaagaaggttcaccacaagggggcccgttgtccccactgttggcaaacatctatctgaataagtatgatcatgagatgactcgccggggcgtcaaggaaattcgttatgccgatgatatcgttttatttgccaaaagtaaacgggcaggagaacgcctgctggagtcttctcggcgttaccttgagaaaaagctgaaactcaaattgaactcggagaaaagcaaagtagtaagcacgtatagtccgcgtaagttcaagttcctgggttatgcactgggcaaaagtcgccaaggtaccttcattcgcatccacgctaaagcgctgaagaaagcgaaagagaagttgaaagagctcacgtcgcgctcccagggtcgtaaaatttgcgaggtgtttgcccgcctgaaacgcttcgtgaacggttggattaattactttggaattgcgcggattaaaaaaacccttgaagattgggatggctggttgcgccgtcgtattcgtatgtatatttggaaacagtggaaaaaaactcgccggcgtaaagaaaaccttatgaaactcggcgtacctgaatggcgtgcatgcgaagccgcgtactcccgtaaagcatattggcgtagcgccaaacatgcgtcagttcattcggctttaacgaatgaacgtttagctcgtgcaggttattacagcttatctgaacggtacgaatcgctgcacctttatgattga

SEQ ID NO: 97 - DNA, 1422 bp, synthetic construct
  source 1..1422: mol_type = other DNA
atggctagcgcatggagtcatcctcaattcgaaaaatccggaatggttcgctcacgtaaagaacgtatgcgtgaagaagataaaagtcgccccaacacgcgtctgtgtgagcaattaattagtctggcaaatattcagcaggcggtcaagaaagtaatgcagaataaaggttcagctgggattgatggcatggaagtgacggagcttccgtcgtatcttgaagcgaattgggccctgattcgtgagcaaattgtgacgcgtacttacaaacctaagccggtgctgcgccgtgagattccaaaggataatggtggcatgcgcctgctcggtattccaaccgcggtagatcgtgtgatccagcaagcgttggtccaggttctgaccccggtctttgaacctaccttttctgacttttcgtatggatttcgtccggggcgtagcgccgaagacgccgtgcgcctggctcagacctatatgagcgaagggtacaagcacgttgtagatcttgacctctcgaagttcttcgatacggtggaccatgacatcttaatgggcctcatcgacaagcacatggatgataaagacgttcgtcgtctgatctatgtctatttgaaaagcggtgtcatgacgaacggctccatggccgtgaccgcgctgggtaccccgcaaggcggcccattaagcccgttgttatctaatgtttatctgacaccgtacgatcgggaattggagaaacggggtctgcgtttcgtccgctacgcagacgattgcaacatctttacgaaaagtaaaatgtccagctatcgtgttcgcgactccgctaagagttatcttgaacggaaactgaaactgaaagtgaacatggagaaaaccgaggcgcggcgtgcagtcggcagtacatttctgggtttcacttttcgcacttatggcaaacgtggtaaacttgggatgacagtgccccatgaaaaaaaactgaaaaagctcgaggatcgcattcgtctggtgaccaagcgcaatcgcggcgtttccattggcatggttattcgtgatctgaactcaattttgcgtggttgggtaggctactttgcccgctctgcaattaaaaattatttggaacgtctgatggaatggatccgccgtcgtatccgccagtatctttggaaacaatggaaaagcggaaaaaaccgcaaacaccgcctgcgtcagctcggtgtagatgaatggaagctgaaaaaatggaaactggggtcgaactcttactggaaaatggcgggaaccatgaactacctgatcgacaaagaatcaattcatggccgctatggtctggttgatatcttaggatattacaataaactgcatgcccagcggatggaaagcgatggtatcgtgttagatgtgcgctacaacagcttattcggctga

SEQ ID NO: 98 - DNA, 1347 bp, synthetic construct
  source 1..1347: mol_type = other DNA
atggctagcgcatggagtcatcctcaattcgaaaaatccggaatggaattgatcgaagtgattctgagtaaagaaaatctgaaccgggcgtataagaaagtcgtggccaacaaaggtgcatccggcgtcgatggcgtgggggttgaagagctgggggactatattcgtgaaaacaaagatgtaatcattacatccattcgcaatcgtacctacatgccgaaaccggttcgtcgtgtgtacatccctaaagaaaatggcaaacagcgccccctcggcattccgacagtgttagaccgcacgatccagcaagctatcgctcaaccaatttgggatatctatgaagaaatcttctctgaatatagctacggctttcgcccaggtcggtcgtgccatgacgcgatccgtcaggccctgtactacctgaatgacggatatgagtgggttgttgacattgacattgagcagttctttgataaggtcaatcacgataaacttattcagatccttggggaacaagttaatgattcgacgaccttaaacctgattcggaagtacctcaaagccggtgtaatggagaaaggcctcgagaaagcaactatcaccggtgtacctcagggtggaccgttaagcgttgtatgctctaacatctatttggataaactggataaggaactggaaaagcgtggcttgcgcttcacccgctacgcggatgatgtcctgatttttacgaaaagtgaaatggctgccaaccgtgtgatgaaaagcatccgctcatggctggaacgtaaactgtttcttaaagtcaacggcaccaaaaccaaagtggtacgtccaacgcgctcgaagtatcttggttttacttttgtgaaaaattcaaccgagtggaaagtgcgtccgaccaatgagaaaaagaaaaaactgaagaagaaactgagcgagtatcttaaacgcggcaaagcggtagcacgtcccttagcggttactattaaacgcgtcaacgaaattgttcggggctggattaattactttcgcattggtatgatgaaacagttcatgcaggagctgggcgaatggttgcgccataaaattcgtgtgattgtcgtcaaacagtggaaacgtccgaaaacgatctatcggaatctctcttatctgaattggaagtataagatcggttgtaaacaagaagaaatttttaaagtggcgaactcacgcctgggttggtaccgtcgctgtggaatgagcgtggttaacttcatcatctccaaagacttgctggaaaaccgtattaaggatggggtgggcctgctgaacccgttaagttattatctggttaaagtgggtatttga

SEQ ID NO: 99 - DNA, 1461 bp, synthetic construct
  source 1..1461: mol_type = other DNA
atggctagcgcatggagtcatcctcaattcgaaaaatccggaatggacgcggagcgtcaacagggtcgcgcctaccagctcactttcaactttgaaggtgacgcggagacgctgcggcatgatcagggcggcgatgacggaattggtaccgcacgtcccgaagaaccgcagacaagcactgcgtccgatccagcacgcgctctgacggagcgtctgatggaagaagtgacgcgcccggagaatcttaatcgtgcgtaccgcaaagtgaaagccaacaagggcgcccctggtgtagacggtatgaccattggcgaccttcgtgcgtggattgctatgcataaagaagaactcattgccagccttctggatggctcatatcgcccgcagccggttcgtggagttcagatcccgaaaccaggtggtggggtgcgccaattaggtatcccaaccgtggtggaccgtctggtccagcaggccatccttcaggtgctggagccgttactggatcccaccttctccccttcatcatttggctttcgcccaggacggggcgcgcatgatgcattgaaacaggctcggcagtatgtcgcggacggacgcgtgattgtcgtcgacgtagatctggaaaaatttttcgaccgtgtcaaccacgatatcctgatggcacgcctggctcggaaggtagccgatcgtcgcctgttaggcatcattcgccgttttctgcaggcgggcttgatgcaggaaggtgtttgcgtggctcgccacgaaggcactccgcaagggggcccgctgtcgcctctgttagcgaacttgctgctggacgatcttgataaagagctggaacgtcggggtcatcacttctgtcgctatgccgacgattgcaatatctacgttcagagcaaggcagcggggcaacgcgttctgggttccgtaacccgtttcctcgaggtggttctgcgcctgcgtgtcaatcgtgataaaagtgaagttgcgtacattgaagaacgtaagttcctgggttatcgcctgctcagcggcggtcggctggggattgcgccgaaaagtctcgagcgtgcgaaggatcgtattcgccagattacccgccgtaatcgcggggtaagcgtggatcgtatgacctcggaattaaactcgtttctgacgggctgggttagttattttcgtcatgcagcatgtaaaagtcaccttacagaattagatggctggatccgtcgcaaactccgttgcgtgcgtctgaaacattgtaaacgctctaaaacgttggccgattttctgggctctcacggcgtcgcccaacatacggcatgggtgaccgcactgtctgggaaaggctggtggcgtttgagcggatccccggctgcccatcaagccatggatcaacgctggtttgcgtcgttgggtttaatcaacctggctcaccgtcatacaaccttgaaccgttga

SEQ ID NO: 100 - DNA, 1515 bp, synthetic construct
  source 1..1515: mol_type = other DNA
atggctagcgcatggagtcatcctcaattcgaaaaatccggaatgtccaaagccgagtatcggcagctgacatttgcgttcgctgactctcctcagggggccggtccggcggctctgaccgacgtgtcggtcggtaaagcttggctggccttaactgcggaagttaaggaaggcaatgattccgccgcatggaccgcagacacgggtcgtctgctggagtcggcgacgagtgccccaaaccttgcacaggcgttgttgaacgttgcacgcaacaaaggcgcggccggtgtcgatggccgtagtgtggatgaagtagttgccgccggcccgcgtttactgccttacctgcgccgggaactgctggcggggacctatcgtcccggggatatccgtcgtgtgtggatcccaaaacccggcggcggtcagcgtggcctgggcattccgaatgtggtcgatcgttgggtccaacaagctgtgctccaagtgctgcaaccaattttcgaaccgacctttcatgcatctagccatggcttccgcccgggccgcggagctcagactgcaatcgatgaagctaaaaaatacctggcagaaggtttctgtttcaccgttgatatcgatctgagcaagttctttgaccgtgttcatcaccagcgtttgctcaaccgcctcgcccaacaggcgtcagacggccgcattttgaaactggtgcaccggatgctgaaggcgaaagtggttctgccggatgggacgcgcattaccactgaagagggagcgccgcaaggtggccccctcagccctattcttagcaatattgtcctggacgagctggaccgtgaattagcacgccgtggacttcgcttcgtgcggtatgcggatgattttagcgtatttgttcgcagtgaacgcgctggtcgccgtgttatggatagtatccgcaagttcatcgaagggcgtttgcgtctggaagtaaacgaagagaaatcctcagtctcacgcccgaacgatctcacgtttctgggttttcatcttggtaagagtccggacggcaaagtgaccgtcaccccaagccaacgtacaaaagaacgtatggacctgcgtattcgcgaactgacaccgcgtacctggggccagtccgttgccgcttgcattgaaaaagccaattcgtatcttcgcggatggtttggttattttcgtctgtgcacggaagaaggtgtgctcagctttggccgttttgatgcacacatccgccgtcgcatccgggcggtaattgtgcatcagaaaaaacggcctcgccatctttatcgtcacctgctggatcgtggggtatcttgtggaatggcggcgaaagcggcctttcagcgccgtggtttgtggcatcgctctatttcgttcggcatgcacaaagcctacccgaatgcatggttcgcggatcgcttaatgtcattgaaagaggagtggcagcgtttacacccgccagagcaggtgagctacaagcagttattactgtttgagtga

SEQ ID NO: 101 - DNA, 1458 bp, synthetic construct
  source 1..1458: mol_type = other DNA
atggctagcgcatggagtcatcctcaattcgaaaaatccggaatgggggcaggggtgcccgaaaaaaagattgaaattagcgaagtcgacctgcatggtggaagccgcaaactgccgcgtggacgtatctctggtgcgaatttccctggcaccgaggggcagccggatccacggaaaccagatctgattgaaatgatgctcgaacgtggtaacctgttggaagcattgcaccgcgtggaatcgaatcgtggtgctgcaggggtggacggtttaaccgtgtcgcagctgcgccagtatcttcgcgttcattgggcaggaattaaggaacaactgctgaaaggcgagtatcagccgcgtccggttcgtcgtatggacatccccaaagcgggtggcggtacgcgtatgctgggcattcctaccgtactggatcgtttgatccaacaagcgctgcaccagatcttaagcccgctgtgggagccgtggttcagtgcgcacagttatggttttcgccctggccgttccgctgcgcaggccatcaaaacagcccagaagcatgtgcagtctggccatcgctgggttgttgatatggacctggaaaaatttttcgatcgcgttaaccatgatgtactgatggcgcgggttgctcgccgggtcaaagaccagcgtgtactgaaactgatccgtcgctacctggaatcaggcattatgttagggggcatggtggagcagcgtacagagggcacaccgcaaggcgggccgttatccccgctgctgtctaatatccttcttgacgacctggataaagagttggaacgtcgccgccataagttctgccgttatgcggacgattgtaacgtctatgttggtagccaacgcgccggagaacgtgtcatgaaatccctgacgcaattcctgcaggcaaaactgaaattaaccgtgaacccgaccaaaagtgccgtcgataaaccatggaaacgtaagtttctcggcttcagtttgactgcagaacgcggtattcgtattcgcgtggcgactccgtcagtcaaacgcctgcaggataaactgcgcgccaagtttcgtgagggccgtggtcgcaatcttcgtacctttattgagggcctgaaaccgcttctgcgtggttgggccaactacttttcagtagcggaaactcgtcaggtgtttgagaaattagatgaatggatccgccgtaaacttcgttgcatggaatggcgcaagtggaaacgccctaaaacccgtctccagcgtttgacggccttaggcttagatcgcgaacgggcgcggttgggcgcctttaacggtcgtggcccatggtggaacgctggcgcttcgcacatgaatgcggcactccccacgagctactttcacaaacttggtctgattctgctcacggaagaagtggattggcaaaccgccctgcggaccgctcgcagcctctga

SEQ ID NO: 102 - DNA, 1437 bp, synthetic construct
  source 1..1437: mol_type = other DNA
atggctagcgcatggagtcatcctcaattcgaaaaatccggaatgcggaccgatgacgccgaagcatatgtttcggcggcctcgacggggaaaggccgtcgcaaccgcttaggttcgggtgccggagcagaagtgcggacggctgctgttggtcgtactaaacccgaggcgctccgcctgatggaagcggccgtcgagcgtagtaacatgctgtgctcctacgaacgcgttgtgaaaaataaaggggcgcctggtgtggatggcctgaccgttgctgcctttaaaccttggttgcaagctcactggccacgtgttcgtcaggcactgttggcaggtgagtacatgcctgcggccgttcgcaaggtcgaaattccaaaaccgcagggcggggttcgtatgctggggattccgacggttttagatcgtctgatccagcaggcattacaccaggtcctgcaaccgctgtttgagccagagttctccgagtcaagctatggcttccggccgggccgcaacgcacatcaggcagtaaaggcggcgcgcgggtatgtcgctgaaggcaaacgttggaccgtggaccttgatttggaaaaatttttcgaccgcgtcaatcacgatgtacttatggcacgtgtagtgcgtaaagtgaacgacgagcgggtaagcaagcttattcgtcgttatcttgaagcaggtctgatggaaggtggagtggtgagcgcgcgtactgaaggcaccccgcaaggcggtccgttgtcccccttactctcgaacattttgctgacggatctggatcgtgaactggaacgccgtggtcatggcttttgtcgctatgctgatgactgtaatatctatgtaggcagcaaacgttcaggccagcgcgtcatgcgtgcgatcacagcgtttctggaacagcgcctgaaactgaaggtcaatgcggctaaaagtgccgtggcccgcccatggcaacgtaagttcctggggtactctatgacctggcacaaaaagccgaaacttaaaatcgcgcatcaatcacgtgagcgtttcgccgaaaaagttcgtcgcacgttacgtgaagcccggggtaagagtctgaaacgcgcggttgaacgcctcaacccggtgctgcgtggttgggtggcgtactttcgcctgaccgaagtaaaaggtgtgctcgaagaactcgatggctggctgcgccggaaactgcgggccctgctgtggcgtcgttggaaacgcaactacacccgtgcgaaaaatctgatgcgccgtggtttaagcgagcgtcgcgcgtggctgtcagcaacaaatggccatggaccgtggtggaatggcggcagctctcatatgaacgaagcctgcccgaaaagttggtttgaccgcatgggacttgtcagcttattggatactcagcgtcgcttttcttccgtgtcttga

SEQ ID NO: 103 - DNA, 1446 bp, synthetic construct
  source 1..1446: mol_type = other DNA
atggctagcgcatggagtcatcctcaattcgaaaaatccggaatgaccactgaaaatcgtcgtaaggaagaagcgaaaacggaagaatcaggccggaatccggtgctgcctctgaactcggccatggttgatgaaactaaacgggaagaaagtttactcccggataaccaacggtacattccgattcctaaaattgaaggagttgtttcggattataatatccaagaggcgacgaaagctgtgattcgtaacaaaggggcgccgggaattgatagtatcaccacggaagagatcgagggcattctgcagaaagaatggcccaagattaaacaagagatcttagacggcaagtaccgcccaagcccagttcgtcgcgttgaaatcccaaaaccggacaaaaatggcgtccgtaaacttggcatcccgaccgtcatggaccgtattattcagcaagcaatctaccaggaactgatgtttacattcgaggcaatcttttctgagaatagttatggttttcggcgttcccgcaatgcgcagcaagctgtgctcaaagcgcaaggatatatccaggaagggtacgaatgggtggtcgacatggatcttgagaaattctttgacaaagtaaaccacgatattctcatggccaaagttgcgcgccgcatcaaagataagaaaatcctcttactgatccgccgctacctgcaggcgggcgtgttagaaaacggtctggtaaagccttcggaagagggtacaccgcagggtgggccactttccccgttgttgagcaacattatgttggatgattttgataaggaattagagcgccgcggcctgcggttcgtgcgctatgccgatgattgtaacatctacgtgaaaactgaaattgcaggacagcgcgtgatgaaaagcgctatcaagtatctgacaacccgtctgaaactgaaggtaaacgaagaaaaaagcgccgtcgcacatccgtgggagcggaagttcctgggttttaccttcaaaaaagaagaaccggggaaaattgccattcatgagtcccgtatcaaacgtttgaaagacaaaattcggggtctgacgaaaaaaatgcgtgatggtaatcttacggtaagcattcgtaagtttattatgcctattgtccgcggctggaccaattatttcggcatcgccgaggaacagggtatttttgcgagcctggacggttggattcgccgtaaaatccgcggcattcagtggcgccagtggaaagaaccccgcacccgcttcaaaaaactgaagtcactgggcattaaagaacagaccgcgcgtaaccatggttattcttcgaaagggccgtggaaaatggcacgttcccacgtgatgcacaaagtcttttcaaacagcaccatcgaaagtatgggctatattcccatggccaagctggtttgcgctcgttcttga

SEQ ID NO: 104 - DNA, 1272 bp, synthetic construct
  source 1..1272: mol_type = other DNA
atggctagcgcatggagtcatcctcaattcgaaaaatccggaatgtacgaagcactgcggcgcgtcgaaggcaataaaggtgccgcgggcatcgatggaatggaagtaaaagatcttcgtccgtatctgaaagcccattggcaagaaatcaaagggcagctgttagaaggtacctataagcccaaaccggtgcgtcgtgctgaaattccaaaaccggacggcggtgtccgctttctggggattccttgcgtgattgaccgcttaattcagcagtcactgttacaggtactcacgcctattttcgaccccggttttagcgaacactcatatggttttcgtccgggacggggcgcccatcaggccgttcagaaagcgaaagaatacgtcggcgagggttatacctatgttgttgacatcgatctggaaaagttcttcgaccgcgtgaatcacgatgcgttgatggcgcgcgtggcacgcaaagttgaggataaacgtgtactcaaacttatccgtgcctaccttaatagcggcatcatggtcgatggcgtgtgcattcgcaccgaagaagggaccccacaaggcggtccgctcagtccgttgctgtccaacgtcatgctggacgatcttgataaagagctggagaagcgtggtcatcgtttcgtgcgttatgcggatgattgtaatatctacgtgaaaagtcaacgtgcaggagaacgcgttatgggtaatgttaaacgttttctgggcgagcgcctgaagttaaaggtgaatgaggcaaaaagtgctgtgggcaaagtaaacgcccgtaagtttctggggtttacactgtctagcggcaaacgctcgcgcatccgcatcgcgagcaaagctctggagcgtctgaaagatcgcatccgcgaattgactcgtcgttcttggggtattcgtatgggcgaacgcattcggcggctgaacgtctatttgcggggctggattggttactaccgtttggcggaaagcctgtccgtgttgaaccaattagacggctggatccgccgtcgcctgcgcgtttgcttattgaaacagtggcgcaaaccgaaggcgcgttggcgtaaccttgtgaagcttggtgtttctgaggaatgggcctatatgatttcggggtcgcgtaaagggtgttatcgtctgtccctgactcaccagctgaacaaagcgctgggactcgaatactggaaaaaacagggcttactgtcactggctgaaacgtatctgaacattcgtattgcactctga

SEQ ID NO: 105 - DNA, 1362 bp, synthetic construct
  source 1..1362: mol_type = other DNA
atggctagcgcatggagtcatcctcaattcgaaaaatccggaatgaccgaggcagttggggaaggagtttgggagcaggtatttgaacgcaaaaacctgctctcagcattaaaacgtgtggaagccaacggtggcgcgccaggtgttgatggcatgactgtcgaggccttgcgtccatatctgaaagctcactggctggaagtgcgcgcagctctggactgggggtcttaccgcccttccccggtccgtcgtgtcgaaattggtaaaccggatggtggcgtacgcctgttagggattccaacggtagcggaccgcctgattcaacaggcgattggacaggtcctgacgccgctctttgagcctgtgttcagcccgcattcctatggatttcgtccgggacgtcgtgcccacgacgctgttgaagcggcgcaaggccatatccgtgaaggctacacctgggtggttgatatcgaccttgaaaaatttttcgatcgggtgaatcatgacaaacttatggcgcgcgtcgttcgcgttgtaaaagataaacgtgtgctgaaactgattcgtcgctaccttcagagcggtgtgatggttaatggtgtcgtgatggagacagaagagggcacgccccagggcggtcccctttcccccttgctggccaacattatgctggacgatcttgataaagaactcgagcggcgtggccatcgctttgttcgctatgcggatgattgtaatatctacgtccgtacggaacgtggcggcgaacgcgtgatgaattcggtgcgtggctttctggagaagaaactcaaattgaaggtgaacgaaaagaaatcggccgtggcacgggcaggccagcgtaagttcctgggttttagctacttctaccgcaagggcgaagtgctgatccgcgtagctgaacaagctcaacaacgcttgcgcgaaaaattacgcggcctgacccgtcgtacccggagcggccgtctcgaagaaattatccagcagctgaaagaatatatgcgcgggtggatgggctattttcgtttagcagataccccgagtgtattcgcggggttagatcagtggctgcggcgtcgtctgcgtcaattgctgtggaaacgctggaaacggggtactacgcgttggcgtgaactggtgtcgttaggtgttcctcgctctctggcgggacttggtgccactgggtcaagtccgtggcgcatggccgccaccccagtcgttccgatggctctgagtaccgcgttctgggacgcccagggtctgtgtagctttaccgagtattatcatcagttgcactggccgcgccgtacagcgggttgcggtccggcatgcccggtcgtgtga

SEQ ID NO: 106 - DNA, 1497 bp, synthetic construct
  source 1..1497: mol_type = other DNA
atggctagcgcatggagtcatcctcaattcgaaaaatccggaatgagcagcctgcgtaacgagcaaggccgccagaaactgtcagatcgcgaaaccggtgaaccgacacagcaggtcaaacctgaaggtgaagtgcagtcagcggagccttttccggcgcgcgatgatggcaaaagtgacgagagcgacggcctctctttatcgaaacccgtgtgggaagcagtgttcgcccgcgcgaatctgtttgcagcgctgaaacgcgtggaatcgaataaaggtgcagccggggtagatgggatgaccgttaaagagctgccggcataccttaaagcacattggttagaagttcgcgacgctttggaaagcggcaagtatcgcccgtccccggttcgtcgcgtggaaatccctaaaccggatggtggtgtgcgtcagctgggcattctgaccgtgctggaccgtctgattcagcaagccatcgctcaggttctgaccccaatgtttgaaatggcgttctcccccaactcgtatggcttccggccgggccgctcggctcatcaagctgtagaacgtagtcaggaatacattcgggaaggatacgactgggttgtcgatattgatctggaaaaattctttgatcgcgtaaaccatgatatgttgatggcgcgtgttgcccgggtcgtgaaagacaaacgtgtattaaaactgattcgtgcataccttgaaagcggcgttatgttaaacggagtggttatggatacggaagaaggtacccctcagggcggtccgttaagtccgctgctttcaaatatcatgctgaccgacctggatcgcgagcttgaggaacgcggccagaaatttgttcgttatgccgacgattgcaatctgtatgtcactccagcactggccggcggagcgcgcgagacggaacgtgcgggcgaacgtgtgctggagagcgtaaagcagtatttggagaagaagctgaaactcaaagtcaatcccaaaaagagtaaggtggagcgcgccactcgtgccaagtttctcggtttcagtttttggaaacgtaaaggagaagtttttattcgcttggcgaaacgtaccaaagaacgcttcgcggagaagatccgttaccttacgaaacgtacccggtcagggaaaatggaagatatcgtctccgaagtaaaccgctacactcgtgggtggatcgggtattttcgcctggcgaccacaccatccgtgtatcaagaaatggatgaatggattcgccggcgcttgcgtcaaattcagtggaaacgttggaaacgtggtcgtacgcgttaccgtgaactggtccgcctcggtgtgccgccaaaacgtgcagctttaggtgccgtcggcacgtctccgtggcgtatgtctcacagcccgatcattcacgaggctctctctaatgcgttttggcgcaacacgggcttggagtccatcacagaacggtataaccaattccgttatagccactga

SEQ ID NO: 107 - DNA, 1443 bp, synthetic construct
  source 1..1443: mol_type = other DNA
atggctagcgcatggagtcatcctcaattcgaaaaatccggaatgaagtcaggtggtgaatggcgccagcagctgttgccgtttgaagcggaagcaccgaccggtggcgcgggccaaaactcagcagggccggcaggtgtcagccgtgctccatggcgccagccggatcctgcatcggctcgcccgacgctgctgcgtgaaatcgttcgcgaacgcgttcttgaggccgcttggaaacaagtgcgccgtaaccgtggcgcgccgggtattgacggaatgcgcgtaggcgattttgaagaatggattggcgtacacggtgatcaggtgcgtgccgagattctggcaggaacgtatgaaccgcagccagtacgtcgtgtggaaatccccaagcccggcgggggcgttcgtttgctgggtgtgccgacggtgttggaccgcgtaatccaacaggcccttgtcattgttctcacccctatcttagacccgacctttagtgagagcagctatggcttccggccgggtcgtagtgcacatggagcggtggcggcagctcgtcgccacattgcggatggttaccgctgggtagtcgaccttgatctgagcaagttcttcgaccgggtcaaccatgacgtgctggttgatcgtttatggaagcgcctgggcgacgggccgttactcagtttgattcgtcgctatcttaaagccggcgttctgatcgagggtgtggtggtcgagagtgttgaaggcactccccaagggggacctctctccccactgttatccaacgtcttactggatgagtgggatcgtgagctggaacgccgggggcatcgctttgtgcgctatgctgatgattgtaatatctacgttcgtagccgccgggcgggcgaacgtgtgctggcatcctgccgtgattttctggagcgtcgtttgcgcctgaaagtgaatgaagaaaaaagcgcggttgcccgtccgtgggcgcgccaatttttaggctactccgtgaccaacggcaaaaaaccgaagcagcgcctggcgaaacgtagcgtcgtccgtctgaaagaacgtgtgcgcgccattacctcacgttctcgggggatttcgctcgagcagatgttgcgcgaattgtcccggtatcttcgtgggtggtcaggctacttccgccggattgaaacaccttcggttttagaacagctggattcttggatccgtcgtcgtgtgcgctcgtttctgctgaaacaatggaaaccaggtcgcggacgtcgtcgtgcgatccagaaactgggtgtggatgacggctggcgtctgagtgcctctcgtaaaggtccatggcgcctgtctcgcggtaaagtaattagcgcggccctgccgaatgctactctggaacagcgtggcctcgtcaatcttaaacaggaatggaaacgcctcgccgaactgttctga

SEQ ID NO: 108 - DNA, 1290 bp, synthetic construct
  source 1..1290: mol_type = other DNA
atggctagcgcatggagtcatcctcaattcgaaaaatccggaatgaccaccgaatgcacgatggaagcgatgttcaattggctgaacctcgaggaagcactggaagccgtcaagcgtaataaaggggcggccggcatcgatggaaaaagtatcgctgaaactgagcaacacattgaagaatactggacccaaattgaagcgaaacttatggcaggtcagtatattccgtctcaagtgaaaggcgtgaaaattccgaaaccgaatggggagaaacgcttattgggtattcctaccgttcaggaccgtgtgattcagcaagccatgaaccagcagctgagcaaagcctttgaccgcgagttttcgatcaacagctacggcttccggccctatatgtcggcacagcaggcggttaaacaggcgcaactgtacgttcaacaaggcaaacactgggtcgtcgatattgatatctccgccttctttgatgaagtcaatcacgacatcctgctccatcagctgtcacagaaagtaacggacaagcgggtgcaaggcttaattcgtaagtaccttaaaaccggtattatgattgagggtaagctggaacgccgtggaaaaggcatgccgcagggtagtccgttgtcgcccctgctggctaacatctacctggatcgcttagacaaagaattggagaaacgcggactgagcttctgtcgttatgcggatgatacatccctgtatgtgagctctgaacgtagtgccaagcgtgtcctggaatcgttgacccagtggattgaaaaacatttgaaactgaacgtgaaccaatcaaaaagtggcacgggtcgcccatgggaaagccagtttctggggtttcgtattggtaaagatggcgaaatcggtatcgctccaaaaagtattgaacgctataaagaaaaagttcgtaaactgtgggatgctcgtcagtccctgacgtcaaaacagttaattgagcagtggcaaaagtattccatcgggtggtggaattattttaagcttgcgactaagcgctggaccatccggtgttgggtaggttggacgcgccgtcatattcgcaagtgcttctggcagcgctggcataataaaaaaggtcggctgaacgcgctccgtcgcctgggcgttagcgagtatcttcagaaaacagcatcgtcctcacgtggcgcgtggcgtatcgcgtctagccctgctctgcataaagcattaagcaacgcaactcttcgccgttacggcctcgacgtgccgccgttatctgccgcctga

SEQ ID NO: 109 - DNA, 1311 bp, synthetic construct
  source 1..1311: mol_type = other DNA
atggctagcgcatggagtcatcctcaattcgaaaaatccggaatgggcaaacagcggagcatgacgccacatcagccttctttactgatgctccgtattgttgagcgtaataatctgcagcgcgccctgaaacaggtgcaacgtaaaaaaggcgctccgggtgtggacggcatgacggttgaggaactgccggactacctgcgtgcccactggccacagttgcgtgagcaactggtgggtggtacctatcgtccgaagccggtgaaacgtgtgttgatcccgaaagctaatggtaaacaacgtaaacttgggatcccgaccgtggtcgatcggttcgtgcagcaagcgattgcgcaggtcttatcagagtattgggaaacgaagtttcatccggactcttacggcttccgcccccaacgcagtgcccatcaggcaatccgccgcgtgcaggcgtatacccgtgcagggtatcgcacggcggttgacctggatcttgaatcattttttgatgaggttaaccacgaccggctgatgcgtgctcttcatcgcacccaccccgacaccgatgttttgcagttagtaaaccgttaccttaaagcaccagtgtccacatgcgatggacgtctgtcttcggaaaaaggtgtgcctcagggcggtcctctgtccccgcttctggctaacattgtcctgaacgaaatggattgggaactcgaacgtcgccagttacgtttcgcgcgctacgccgatgattgtcagatcctggtaggctcccaccaggcgggtcagggtgtcatggcatcattgacccgctttattgaaaaaaccttgcgccttaaagtcaatcgtgaaaaatcggccgttgccgatgttcacgaacgcacatttctgggctttgtcctcacgcgccgtgatcaacgcatccgtgttagtgggaaagtactcgaaaaattaaaagcaaccgtgcgcactgtaactcgtcgcacccgtggacatagctttcgcaagattctggaagagctgcgccgctcgctgttggggtggaaagcatatttcgacgcaagcgaagtcctgagtcccctgaaagaactggataagtggattcggcgtaagctgcgttgctatctgtggaagcaatggggtcgtgcgggctatcgccgcctgcgtgaattgggcgtaagccgtcaactggcgtggaacacagctaaaagtgcgcatggcccatggcggattagccattcgccggccctctaccacgccctgccgacttcctacttccgtagcttaggactcccggagttagcggcgcggtga

SEQ ID NO: 110 - DNA, 1413 bp, synthetic construct
  source 1..1413: mol_type = other DNA
atggctagcgcatggagtcatcctcaattcgaaaaatccggaatgtcgctgaaacatgctatgcaccagatgctcggccaaccgggccgtgccaatgtgggggaaggcgaaccgcagctggatgtggtaagcgatgaagcatcattagcgggtcatacccaggaagggagtggccaggaagacttgctgcaacaaatcctgctgcgtgaaaacctggtgaaggcatggaagcatgttaaagccaataaaggtagcgcgggcatcgatggactgacgattgagcagactaccgaatatctcaaaacccactggtcaaaaattcgtgaagagttgctgtctggccaataccgccctcaagcggtgcgttgcgtcgaaattccgaaaccaggttccggtacccgtgaactgggtatcccgactgtggttgatcgtctcattcagcaggcgatgttacaggtgctgcagcccttaatcgacccgacattcagtaacttttcctatggctttcgcccggctcgctctgcacataacgcggttctgaaagccaaacgctacgtcgaggaaggttatcagatcgtcgtggatattgaccttgagaagttctttgaccgcattaaccacgatatcctgattgatcgcctgtcgaagaaaattccggataaaagtgtgctcggcctgattcgccgttaccttcaggcgggcacgatggtgaatggtgtagttatggaacgcgaagaaggcacgccacagggcggtccattaagcgcactgttagctaatgtcttgctggatgaagtcgacaaagccctggagcgccgcggtcataagtttgcacgttatgcggacgattgtaatgtttatgtacatagccaacgcgctggagaacgcgttcttcagtcattgcgctgcatctacgccaaacttcacctgaaagtaaacgaagctaaaactaccgtgggaacagtgttcgggcgtaagttcctgggctattgcttgcgtcgctggtcgggtgatacggtgaaaattgcggtggccaccaaagcattagagacattcaaacagcgcattcgtctgatcacctgtcgtgtaggcggtcgtagcatgattcaagttgccgagcgtctccgcgcgtatctgccggggtggaaaagctattttcgtttggcgcagacgcccactacctttaaagatcttgactcctggctgcggcaccgtctccgtgccatccaactgaaacactggcgtcgtggatctacgacctaccgggaattacggaaactgggggctacccatgagatggcgagtttgatggccgggggtgcaggccattggtggcggcattccaagtttaaccttaacatggtcctgaccgttgcgtactttaataacctgggcgtcccttggctgacgtga

SEQ ID NO: 111 - DNA, 1419 bp, synthetic construct
  source 1..1419: mol_type = other DNA
atggctagcgcatggagtcatcctcaattcgaaaaatccggaatgaaaaatggcgaggaaccgtccccggactctactcgtcgcctttcacgtccgggtcaagccgctgccgccccgtccgagaaaccatccccgagtctgtttccagaacgcatgatggaagtcatcgtggactctgcaaacatgcagcgtgcttgggatcaagtccgcggaaaccgtggggcgcccggacccgatggtgttacgctgacgcagtttcctgaatggtttcgcccgcagtgggccgtaattcgccagcagctgctcgatcgcacctacgagccgtcaccagtgcgtcgcaaaacaattgacaaaccggatggtggccagcgtcagttggggattccgaacgttctggatcgtctcattcagcaggcgattcagcaagtgctcaccccggtgtttgacccgggattttcggatagctcgcacgggtttcgtccaaatcgctcggcccatggcgcggctaaacaggtggaacgcacgattcgtcgcggtcgtcgcttcgtggtggacatggatctgtctaagttctttgatcgtgttcaacacgatgtgttaatgtcgcgcgttgctcgtaaagtgcgggatcggcgcttactgaaactgattggtcgctaccttcgtgcaggtgttatggtagaaggcgtcttgcagagcagccctgaaggtacccctcagggtggccccttatcaccattgctggcgaacatcctgctggacgacatggataaagagctggagcgtcgtggcttgccgtttgtccgttatgccgatgattttgtgattttcaccaaaacacggcgtgcggcggaacgcgttttcaacggtgtaaaccgctatcttaccaaggttctgcgtttagtggtcaatcttgagaaatcccggatccttccggcggacggggtagaatttctgggcttcgtctttcggggcgtcacaggtaccatccacgtgagcgaaaaaagcgttcaaaagtgcaaacgctggatccgtgaactgaccggccgctctcgcggcatcagtatgacccaacggttgggggaactgcgtcgctatttgcaaggctgggcaggctacttcgcactggcgaaacagatgcgtctgttcgaaaatcttgaccagtggatccgtcggcgtctgcgcatgtgcctgtggaaatgttggcgttttgttcggacgcgtgtacaaaacctcttagcactgggtgtacctcgccgccaggcgttccgtcatgctaaaagtcgtcagggcccgtggcatatggcgaagactattgccagcggagtcggtatgacgaatgcatggctgcatgatcaaggcctcgtgagcttaaagagtctgtgggttaaacgtgcacctctgcgccgtactgcctga

SEQ ID NO: 112 - DNA, 1311 bp, synthetic construct
  source 1..1311: mol_type = other DNA
atggctagcgcatggagtcatcctcaattcgaaaaatccggaatgaaaaaatggtattcgctgatcgataaggtgtaccgcctggataaccttaaacgggcttatcgcgcggttcgtgcaaataaaggagcgccgggtgtggacggtgaaaccgtcgaagcgtttggtcagaacctcgaggagcgcttacatcagttacatcatgaactgaaaacgggtacgtacgaacctcaaccggtgctccgggtcgaaattccgaaagcagacggcagcaaactgccgctcggcattccaacagtgaaagaccgcgttgtgcagcaggccttattgaacattatgcagcctatttttgaaccggattttcacccgtcgtcctatggctatcgcccgggtcgttcatgtcatcaggctgtggccaaaagtgagcgtttcatgaacaagtatgggttagagtatgtagtagatatggacctttctaagtgcttcgaccgcctggaccatgaactcattctggaaggcgtaaaccgtaaggtgtctgatggatctgttttgcgcctgattaaaaaatttttaaccgccggtgtcatgaaaaatggcgcatgggaagaaactgatattggctcaccccagggcggggtgttcagcccactgatcgctaacatctacctggatcgctttgatcaagatatgaaacgtcgcggtattcgcatcgtacgttacgcagacgatattctcatctttgcacgtactcaccgtgaggcccgtaagtatcagaaactggcgacggaaattttggaaagcgagctgaaactggttgttaacaaggaaaaaacccacctgacatccgtcaaaaaaggcgtaacctatcttggtttcatcatcaaaagtaagttcgtcagtatccacccaaaaaaaattaaaagtttcaaagatcgtatccgccaactgaccccgcgtaatcatggaattaacgttgaagaaatggttaaacgcctgaacccggttctgcgcgggtgggccaattattttcgtgtggcgaattgcaagatgcttttcctgcagctgatggaatggattcgtcgtcgcctgcgtatgaaacaaatgaaagaatggaaaagctggaaaccactgcacaaagcgttacggcgccgcggttacaaaggcgagtttcggaagatttcagtgacccgttggtgtaattcggctagccctttggtcaatatggccttgcccaattcctggtttaatgaaatcgggctgattaaccttgcgagctacaacgtgggcatcttgcaccatttttgggagtga

SEQ ID NO: 113 - DNA, 1329 bp, synthetic construct
  source 1..1329: mol_type = other DNA
atggctagcgcatggagtcatcctcaattcgaaaaatccggaatgggcgacactatgaccaaacgcaagcatcacagtctctatggccagatcctgcaacgcttagataccgcattcgcgaaagtgaaagcgaatcgcggcgcggcggggattgatggagagtccattgccgagttcgagcaagatcttgaagctaatcttgcacaactgaaacgcgatcttaaagaaaaaacgtacgcgccacaacccgtccgtcgtgtgtatattccaaaagccagcggtgggcagcgtccgttaggaatcccaactgttcgtgatcgcgtggtacagcaggccctgcgtttagtgctggaaccggttttcgaaccgctgttttgcgacagttcttacggtttccgtccgggtcgctctgcccatcaggcgctggaccgtgtgagcggccacctgcgtgaaggttataagtgggtggtcgattgtgatttgaaatcgtatttcgatacaatccctcaggaagcattgatcgatcgtgtggcagaagaagtcgcggatggaacggtcctgaaactcatccggtcgtttctccaggccggggttatgagtgaaggccagcttcagcgcaccatcgctggcacgcctcaaggtggcgtaatcagcccactgctcgcaaatatctatctgcatggttttgaccagctgatggaagatcgcggcctgcgcctgacgcgttacgcggacgattttgttattttatgccgcacccaacgcgccgctgaacgggtaatggggaatgtccagtcatacttggaaggccagctcggtctgacggttaaccgcgaaaaatccaaagtcgttcacctttccgagggctttgttttcctgggctatgagtttggaacctggggtcgtcgtccggggcctaaagccattctgcggttcaagcaacgcattcgtgaactgacccgtcggaaccagactattcccgtagataagatggtgcgtgagcaactgaacccgtatctgcaaggctgggcaggttactttggctatggccaggtccgtcagcgttttctggactacgataagtggattcgtcggcgccttcgtatggtccagctgcgctcgtggcgccatatgaaaggtttgcatcgtgctatgcgtcagaaaggttggaaagggccgctgccggcggtttatgtgaacatgcgtcgttggcgctcttcagttcacagcttagtgaactacgctttgggcccggactggattcgcggtctgggtttggtgagcttagtggactttcatcgtccgaccatggtaacagtgacccgctga

SEQ ID NO: 114 - DNA, 1215 bp, synthetic construct
  source 1..1215: mol_type = other DNA
atggctagcgcatggagtcatcctcaattcgaaaaatccggaatggggcaaatgctcgaggccatcgcagacccggcgaacctggccgcagcgtgggcaaaagtccgggccaacgccggtgccgctggtgtcgatggtcagtccattgcggcgttcgatgcggactcggaacatcagttagttcgtctgcgccggcgcttactgtctgcagagcgctatgtcccgccgcctgtcttacgtgttgaaatcccaaagccggatggacgtatgcgccccctgggcattccgaccgtggctgatcgcgtggtgcaacaagcaacgcgccaggtgattgaaccacactttgaagcggaatttctgccgtgctcgttcggctatcggcctgggcgctccgcacagcgtgcagctgtttggtgggtaaaagaagcgatccgccgcggtgatcgctgggtggctgaatttgatgtggaaggattctttgatcaccttagccatgcacgtctcctgcgccaggtcgccaaaaaagtagacgaccccgaggtgattgggctggtgcggcgttggttacgcgcgggcgtctttagcgccgaaggcctggttcccagcgtggcgggcaccccacagggtggtgttatttcaccgttgctggctaatatctaccttcatcgtttggacgtgaaagtgcgtgcggcgggtttccggctgatccgttacgccgatgatttcgttattctggctgaccggcggtggaaagtaaaagcggccgaccgtctggttcgcagtatcctgtccgatatgggactgtcagtatctgaagccaaaagtggtgtcgtccgtgtacgcgacggcttcgagttcctggggtttacaatccatggccgctttttgcgtccgcgtccacgtgcgttggctagttttaaagatcgcgttcgtagccgtacccgtcgtcaggcgcctgtgtcgatgagccagatgattgatcagcttaacccgttactgcgcggctggggcacgtactatgcgattggggacgtagtttcactctttgaggaccttgataagtggattcgtatgcgcctgcgtagcaaagcccgtaaacgcttcaaaagtaaaggcggtcctgatggccaaaagtggccgaataaagcatttgatgatttgggcctggtgcgcctcgaacaccttgcccgcactggtaagctgtctccggtttga

SEQ ID NO: 115 - DNA, 1203 bp, synthetic construct
  source 1..1203: mol_type = other DNA
atggctagcgcatggagtcatcctcaattcgaaaaatccggaatgaaaaaacgcaagtggtactcactggtggacaaaatttggaaattcagcaacctcgaggcagccttttctaaggtgaaagagaaccgcggcgccgcaggtatcgatcgtgtttcgattggtcagttcgaacgccagaagcagcaaaatcttctggaaatccagcgtctgctgcgcagcaaacgttatgaggctattcctgttcgtcgtgttgaaattccaaaaagtgatggccgttaccgtcctctgggtattccgaccgtccgtgaccgtgtcgtgcaacaagctacttttgcggtgatgtcgccgatttttgaaacgaagttcctggactgtagctatggttttcgtaaaggccgcaatacccatcaggctattgcaaaaatggaacagtatcgtaacgaaggctgcgaatgggttgtggaagcagacatcgaatcctttttcgatactgttaaccatgaattattgatcgatcaggtcgctgaagagattagcgatgggagtgtcctgaaactgatccgtagttggctgacggcgggcgcgtttaaaggcaccgaagtgattgagacaagcgtagggacgccgcaaggtggagtaatctcaccactgttagccaatatctatctgcatccgtttgatgtccagatgacagcattgggttttaaacttgttcgctacgcggatgactttgtgattatgtgccgctctgaagatgaagcggaacgtgcgatggaagccgccacccgtattctctcgggcatcaaacttcgggtgaaagcggcgaaaacgcgcatcgttcagttgagcaaggatgacggcatcgaattcctcggttttaccatcttcaaagagcacaaagtaccccgcactcgcgcagtagaaaatttcaaaagtcggattcgcctgattacccgtcgccaacgtccggctacccttcaggaaattattaaagagttaaacccggtggtgcgcgggtggggaaactattttaaaatcgccaacgtcaattggctctacaaaggcctggattcctggatgcggatgcgtctgcggtcctttttagaaaaaaagaagtcctacgaggcgaacaaacgcctggagaataaacacttctcggaagccggtttgaccacgctgtcatctctgattggatattga

SEQ ID NO: 116 - DNA, 1425 bp, synthetic construct
  source 1..1425: mol_type = other DNA
atggctagcgcatggagtcatcctcaattcgaaaaatccggaatggcatcccccgccaccgaatgcccggcgggccattcagcggtggcgacaaaaagtagcgcgggtcaccgtgttggtttttttgctgcacggcgcgctgctaagagtcagggccgccgccagggtcaggatgggcagcaacgcagtcccaaaccgtcatctgggaatgcccgcgcggaaggcccgcgccgtgtcaaacggaaagtgagctctctgatcgaccaggtgtaccggtgggaaaatctttatcgggcatggcgccgtatccgtcgcaacaaaggtgtgcacggcctggaccgcgttactatccgtaattttgaggcggattgggaaaaacaccttcgggagattcaacgtatgttaatggaacagcgttatgtcccaacccctgtccgccgcgtgtacattccgaaacccgccgatccgaccaaacgtcgtccgttgggtattccgatcgtggcggaccggattgtacaacaggcaatctttcaggttgtggatccactgtttgactcaactatgtctgatcggtcgttcggctatcgtaaagggcgtaaagcccacgatgccgtcgccgctctcatttccgatgcgaagcaaggctaccgctttgtcttggatgccgatattgccagcttcttcgatgaaattgaccatgatgtggtcatgagctgcgtgcgcgctcgtattgccgacggacgcgttctggacctgtttgaggcgtttttgaaagcaggtgtgtccgaggatggcgaagtttcagtaccggataaaggagtcccacaaggtggagtaatcagcccgtggctgtcgaatctggttctggatcatctggacaaggcaatcgaaaaggaaggctggcgccatgcgcgttatgccgacgatttcgtggttctgtgccgtagccgcgaagaggcacagcgtgcgctgaccgtagttaaagaagtcttagaaacgcttaaacttagcctgcatgaaacgaagacccgcctcacagattgtgagcagggcttcgaatttctggggttccattttcgccactaccgtctgggtattcgtgaatcgtctatcgaacgtttcaaagatcgtgtacgcgcgttaacccggcgctggcaaggtcgtaacgtggacgcggtgttggcagatcttaacccggtcttacgtggctgggcgcgttatttcggcgtggccgaggttagtctgacgtttcgctacctggatagttggattcgcatgcgcctgcgtggttttaagtacaaacgtcgttgttatcatgacaactggcgcttgccatcgaaacgtctgaaacgttggggcctgctcagcctgcagcagtgtcgccctcagttacgtctctcctatgctcgtgcagttgggccttga

SEQ ID NO: 117 - DNA, 1398 bp, synthetic construct
  source 1..1398: mol_type = other DNA
atggctagcgcatggagtcatcctcaattcgaaaaatccggaatgcaggaatctggtagtgctaaaactatgaccaatgatgaaacgactcgcccaaccgccgttgccggtctggatcaacccaaacaggcgggtaatatccgtgaccggtggggctggattgagcatagtgtgtggacggaacgtatgctgacccgcctcgaggcttctgagccgactacggtctggtatggcctgtgggataaagtacatagcgaacgtaacttggaagcggcgttttgggcagtttggcgcaaccgtggcgcaccgggcgtcgatgggcagaccgtccgtcagtttgaagcacaagaacaagctcagctggcgaaacttcgtgaagaattgcgtagcaaacgttaccatcgtcaaccagcccgtcggacgtggatcgcgaagcctggcacgctggagaagcgcccgctcggcattccggcagtgcgggaccgtactgtggaagcagctctgaaacaggtgttagaaccaatcttcgaacaggacttcgcggagcattcctatggctttcgcccgggacgtggttgtcgtgaagccgttaaacgtgtggaagcgctgttaggccaaggtcgggtgtggtgtgtagaccttgacttcaaaagttactttgatacaatccctcacgagcgcctgctgggcctggtacaacagcgtgttgtggatggttccgtgctggcactgttagctcaggggcttaaagccggagtactggaaaccctgaaaggctggcaacccacggaagttgggaccccgcagggtgcggtgatcagcccgctcttagcgaatctgtacctgaacccattggaccacgccatggcggagcgtggttgggaaatggtccgctatgccgatgatcttgttgtactctgccagtcccgcgaagaagccgaacaggcattggcatatcttcgccagtggagcggtgaggcgggtctgtcggttcaccctaccaaaacccgtattgtcaatgcccactcagaaggtttcgattttctcgggtggcatttccgcggcgggaagaaatggccgcgtaaaaagagcttgcagaaactgcgcgataaacttcggccgctgacccggcgtacaaacggtcgttctttagaagaaattattacaaagaccaaccgcattctgcgcggttggcacggctattttcgtgagtcgcatcctacgggcctgagcgggccggacggatgggtgcgtcgccgtttacgcgcgatgctgcgcaaacgtgaaaaacgcccgggctacggtctgagtgaggctgattcacgccgctggcccaatcgctggtttggagtccagggcttgttttcgctggagcatggatcatgcgcctatggctga

SEQ ID NO: 118 - DNA, 1299 bp, synthetic construct
  source 1..1299: mol_type = other DNA
atggctagcgcatggagtcatcctcaattcgaaaaatccggaatgaaggcagaaggtacaggccagaaggtacactctctgatcgataaagtctaccaccgtatcaaccttgatatggcatgggaatctgtacgcgcgaatggcgggagtgggggaattgataagattgccattcccgcgtttcaagctgtggccgaggtagagttggaacgcttacacgaagaattaaaacagggtacttatcggccgatgccggttcggcggatcctgattccgaaaaaaggcaaacccggggaaaaacgccctctgggcattccgacgattcgtgatcgtgtgtgccaacaagcccttaaaaaccgcctcgaaccgattttcgagcctctcttttcggaatgcagcttcggctaccgcccgggtcgttcaactcatcaggccatgcgtaaaatgtatcgtgaaatcctggatggctatgaatggattgtggatgctgatctccgcgacttctttggtaccgttcatcatgaacctctgattgaccgcattgcagagcaagttagcgatggtcgtattctgaaactggtccgtcagatgctggaagctggttacatggaagacggtaaaaaatatgcgacgccgagcggcaccccacaaggcagcgttgtgagcccactgttttctaacatctatctgaaccgttttgaccatgagatgacaagtaaaggttaccgcttgacgcgcttcgcggacgattgggttgtgctttgtaaaacccgtgccgaggcagcgcgtgcgatccgggacgcacgtacaatcttagaatccttgggtctgacgttacatccagagaaaacgaaaattacccacatcaagtggggctttgagtttctggggtataaacttaaacgcggcaaaggtctgtccctgccccaggaaaaggttaagaagcagccaaaaaccaacatctatgcgttccctaaagcgaaaagtgtccagtcgtttatggataccattcgtacccgtacccaccgccgtattccgttaactgtctttcagcttattgactccattaatccggtgatccgcggatggggcaattatttccgtaaagctcatgtccgcaaactgttcaaccgtttgcagcgttggatcgtgcggcgcatctggtcgcatcgctataaacgttggcgcaatgccggatggaagaaactgccggaatcaatcttgtacagcaaatacaatctggtgaatctcctgtcactgattccggatctcaacctgcgtaccgccccgaaaggctga

SEQ ID NO: 119 - DNA, 1338 bp, synthetic construct
  source 1..1338: mol_type = other DNA
atggctagcgcatggagtcatcctcaattcgaaaaatccggaatggaagtgactcgtcgggatcgtgtgaaagctggtttactggagaacatcctttcgcgcgataatatgttagctgcgttgaaacgcgttaaggcaaataagggttcgcatggggtggatgggatgaaagtagacgaactgccggcgtatcttaaagccgcttggcagaccattcgtcagagtctgttagatggtacctatgtacctcagccagtgcgccgtgtcgagatgccaaaacccgatggtggcgtccgtttacttgggatcccgacggtgctggatcgtttaatccagcaagccatcgcccaaattttgtcggatatttttgaacccggttttagctgccattcatatggttttcgtccgggcaaaggagcgcatgatgccattcgcgcggcgcgtgattatatccgtgcaggctacgactacgttgtggatattgacctcgagaagttctttgatcgcgttaaccacgacaaactgatggcgcgcgtagcgcgtaaagtagatgataaacgcgttctgaaactgatccgtcgttatctgaccagcggcgtgctggtcaatggagtgcgcgttgcctcagaagaaggcaccccgcagggcggccctttgtccccgctgttggcaaacattctgctggatgacctggataaagaactcgaacggcgtggtctgaaattttgtcgctatgcagacgactgtaacatctatgttaagagtaaacgggcgggcgagcgtgttatggcatcgattggtcgcttcatccgtgaacggctgtcactgaaaattaacgagaacaagagtgctgtagatcggccggcggctcgcaagtttctgggcttctctttttaccgtaagaaagacgacgtcggaatccgcatccacccgaaaagcgtgaaacgcttcaaggaaaaaattcgttccattacaaaccgtaattggagtatgagcatggacgaacgttttcgccggctgcacagcctgtgcgcgggctggatccgctacttcggcctcgcggatgcaaaaacacatatgcgtgaactggacgaatgggtccgtcgtcggattcgcgcctgcttctggaaacaatggaaacgcattaaaacgcgccatgataatctcgttaaactgggtgtggacagcatgaaagcctgggaatgggccaatacgcgcaaaaaatactggcgcattgccgggtcttgggtgttggcaaccactttaacgaatcaggtcctcgaagatatgggttttcgcaacctttccaaactttactccgagatgacctattcttga

SEQ ID NO: 120 - DNA, 1278 bp, synthetic construct
  source 1..1278: mol_type = other DNA
atggatacctcttctctgatggaacagattctgagcaaggagaatcttaatgccgcctacttgcaggtagtgcggaacaaaggggcggcgggcgttgatggcatgaatgtagaggaactcggcgcctatttatccgagaatggcgaaaacattcgtgagcaattacgcactcgaaaatacaaaccgcagccggtccgtagagtggaaatcccaaaaccggacggcggtgtacgtaacctgggggttcctacagttgttgatcgtttcgtacaacaagccgttgctcaggttttaacacctatctttgaagaacagtttcatgatcattcctatggttttcgcccgaatcgctgcgcacagcaggcagtactgaaagcacttgagatgatgaatgatggtcacagttggatcgttgatatagatctggctaagtttttcgatacggtggaccatgataaactgatgactatcttcgggcgtacaataaaagacggcgatgtgatttcagtcgtccggaaatttcttgtctcaggcgttatgattgatgacgagtatgaggacacgatcgtaggtaccccacagggtggtaacatttcacctcttctggcgaacattatgttaaatgagcttgacaatgagcttgaggctcgcggcctgaatttcgttcgatatgcagacgatcttattattatggtcgggtcaaaacaagcagccgaccgcgtgatgaaaagtgttacccggtttatcgaggaaaagctgggtttgaaagttaacgcggaaaagtcaaaagtggacaagcctaaaggtatcaagtacttgggttttggtttttatttcgatacttttgctaaggcatataaagcgcgtcctcatcctaaagcagttactaaatttaaagcacagatgaaaaaacttacttgtcgttcatggggcgtaagtaacgcctataaagtacaaaaactcaatcagctgattcgagggtggatcaattattttaaaataggaaacatgaaacgtctttgccagcgtttggattcaaatattagataccgcctccgtatgtgtatttggaaacactggaagacgcctaaaaacagagccaaaaatatgatgaaactgggtctgccggcatgggctgcatggcgctctgcctatatccatggttacgctcgagtgtgccgatctcgagatgtccatcggacaattacctcagaacgtttgaaacagtttggactgatgagtatgaccgattattatactgaacgtagcgtagcgtgc

SEQ ID NO: 121 - DNA, 1281 bp, synthetic construct
  source 1..1281: mol_type = other DNA
atggacaccagcagccttatggaacagattcttagcaaagataatctcaatgcagcttatctgcaggtggtccgcaataagggtgctgcaggtgtggatggcatgaccgtggaagagcttggcgcttatctttcggaaaacggtgaatctattcgggagcaacttcgtacccgtaaatatagaccccaaccagtgcgtcgggcagaaatctctaagccggatggtggcgtgcgtaaattaggcgtaccgactgtagttgatagatttgtccagcaggcggtagcgcaggtgctgactcctatttttgaagaacagtttcatgaccacagctacggttttcgacctaaccggtgtgcgcagcaggccgtgctcaaggcattagagatgatgaacgacggccatagttggattgttgacattgatctggctaaattttttgatactgtagatcatgataaacttatgaccattttcggtcgcactattaaagatggtgacgtgatctctgtggtacgtaaattcctggtgtccggtgtgatgattgatgatgagtacgaagatacgattgtcggcactccacagggaggcaatatctctccgcttctggcgaacatcatgctcaacgaacttgacaaggagctggaggcgcgtgggctggattttgttcgttacgcagacgatttgattattatggtgggtagtcgccaggccgctgacagagtaatgaagtcggtcacccgttttattgaggaacgattaggccttaaggtcaacgctgagaaaagcaaagtcgacaaacctaaaggcataaaatatcttgggtttggattttactttgacagttttgccaaggcgtacaaggcccgcccgcatccaaaggcggtggccaaatttaaagcccagatgaaaaaacttacttgtagaagctggggagtatcgaattcatataaggttctgaaactgaaccagctgatacgcggttggatcaactattttcgtatagggagtatgatagagctgtgtaaacgtctggatgagaatattcggtttcgcctgcgtatgtgtatatggaaacactggaaaactccgaaaaaccgcgccaagcttttaatgctgctcgacgttccgcgctgggccgcttataagatagcatactcaggcaaccgttatgcgcgcattacccataatggttgggttcataaggcaatttccaataaacgtctcgcggccttcggcttgatctccatggaagactactatgcgaaacggcgtgttgcgtgc

SEQ ID NO: 122 - DNA, 1281 bp, synthetic construct
  source 1..1281: mol_type = other DNA
atggacacaagtagtttgatggagcaaatactgtcgaaagacaatcttaatgctgcatacttacaagttgttcgaaataaaggggcggcaggggtagatggcatgactgtagaggaattaggtacctatctcagtgagaacggtgagtcaatccgtgagcaacttagaacgagaaagtataagccacagcctgtaagacgcgttgagattcctaagccggacggcggtatacgcaacttaggggttccgacagtagtcgaccgcttcgttcaacaggcagtagctcaggtgctgactcccatcttcgaagagcaatttcacgaccattcctacggattccgccctaatcgatgtgcgcaacaagctgtcctgaaggcgctggagatgatgaatgacgggcacgattggatcgtggacatagacttggcaaaattcttcgatactgtagaccacgataaacttatgacaatattcggacggaccattaaggacggggacgtcatctctgtggtgcggaagttcttggtttccggagtcatgattgacgatgagtacgaagacacgatcgttggaacaccgcaaggtggcaacattagcccaccactcgccaatattatgcttaacgagcttgataaagaactggaagcacggggcctggacttcgtgcgttacgcagacgatctcattataatggtaggatcccgccaagcagccgatcgtgtaatgaagagcgtaacgcgctttattgaggagcgcctcggcctgaaagtcaacgcagaaaagagtaaggtcgacaagccgaagggaatcaagtatctgggtttcggtttctacttcgatagttttgccaaggcctacaaggcgcgccctcaccaaaaggccgtggccaagttcatggcgcaaatgaagaagttaacttgtcgttcttggggtgtatcaaacgcgtacaaggtccagaaattaaatcagcttatcagaggctggatcaactactttaagattggatcaatgaaggggctttgcgaacgcctggactgcaatattcggtatcgccttagaatgtgtatctggaaacattggaagacaccgcaaaatcgggcgaaatacttgatgcaactgggtattggacggaagtacgcctggagtacggcatatactggcgcccgtatagcgtacgtttgtcaacggggtgccatgaacatggccattaccaaggaacgccttacgagatttgggttggtaagtatggctgactattacgccaagcgtcgtgtcacgtgc

SEQ ID NO: 123 - DNA, 1278 bp, synthetic construct
  source 1..1278: mol_type = other DNA
atggatacgtcttctctgatggagcagattctgagcaaggaaaatctgaacgaagcctatctgcaggtcgttcgcaataaaggtgcagccggcgttgatggtatgtcggttgaagaattaggcccgtacctttccgaaaatggtgaaaatatccgcgaacaaatgagaacccgtaaatacaaaccacaacctgtgcgccgcgtggaaataccgaaaccggacggcggtgtgcggaatctcggtgtgccgaccgttgtagatcgcttcgtccagcaagcggtagcccaggtgctgtcaccaatctttgaagaacagtttcatgaccacagttatggtttccgtccaaaccggtgtgcccagcaggcagtgttgaaagctctggaaatgatgaacgacggccataattggattgtagatattgatctcgccaagttctttgatacagttgaccatgataaactgatgacgatttttggtagaacgatcaaagatggtgacgtaatttccctggtgcgcaaatttcttgtttctggtgtgatgatagacgacgaatacgaagatacgattgtcgggacgcctcagggtggtaatatcagtccacttcttgctaacatcatgctgaacgaacttgacaaagaactggaggctcgtggtttagattttgtgagatatgccgatgacctgatcatcatggtgggttctcgccaggcagccgaaagagtaatgaaaagcgttacgcgttttattgaaaataaattaggtttaaaagttaacgctgagaaatcccgggtagataaacctaagggcatcaagtatctgggttttgggttttattttgattcgtttgcaaaaggctacaaagcacggccccatatgaaagctgtggaaaaattcaaagaacagatgaaaaaattgacatgtcgctcttggggcgtatcaaatacctacaaagtaaaaaagctgaaccagctgatacgggggtggatcaactattttaaaataggttccatgaaaaacctgtgccgtaaattagatgcacacattcgttttcgtttgagaatgtgcatatggaagcagtggaagacgccaaagaacagagaaaaaaatctgattaaactgggcttacctcgttatgcagcccatgggatctcctatgcaaaagggtatgcacgcgtctgtcgttcttggaatttacacatcagtatctcgaaagaacggctggccaagtttggactgatttcaatggaagattattatgcagagcggagagttacgtgt

SEQ ID NO: 124 - DNA, 1287 bp, synthetic construct
  source 1..1287: mol_type = other DNA
atggatacctcaagcctgatggagcagattctttcaaatgagaatttgaatgcggcttatttacaggtcgtccgtaacaagggagcagcaggtgtggacggtatggagtatacagagttacaaaaacatctcagcgagaacggggagataattaaagaacagcttcgcacacgtaaatataagcctcaaccagtccgtcgcgtagaaattccgaaagccgatggaggtattcgcaaactgggcgtcccgacggttaccgatcggtttattcaacaagccattgcacaggtcttaaccccaatttatgaggaacagtttcacaatcatagttatggctttcgccccaatcggtgtgctcaacaggctgtcatgaaagctctggagatgatgaatgatggccatagctggatcgtagatatcgatttagaacgcttttttgacaccgttgatcacgacaaattaatgacaattataggccgcaccattaaggatggtgacgttatatcaatcatcagaaagtttcttgtctcgggcataatggtcgatggcgagtatgaagatagcgtaattggtacgcctcaaggtggcaatttatcaccactgttagccaacattatgttaaacgaactggataaagaaatggaagctcgaggtctggattttgttcgttatgccgatgactgtattattatggttggctccagacaggctgctgaacgtgtgataagatcaataacccgctatatcgaagagaagttggggttgaaagttaatgcgtcaaaaagtaagatagacaaaccaaagggaattaaatatctggggttcggattttattatgactcatttgcaaaagagtaccgtgctaaacctcatgcaaaggccgtcgagaagtttaaagcacgtatgaaagagctgacgtgccgttcttggggtgtcgataacggttataaggtcaaaaagctcaatgaattgatccggggttggataaattatttcaaaattggaagcatgaaagggttatgcgagaaactggacgcgaacatccgttaccgcctgcgcatgtgtatttggaaacactggaaaacacctcagaacagagcaaagaatctcattaaactcggaatatcacgccggtacgcatggtcaaccgcgtattccggggcacgtatcgcgtacgtctgtcagcgtggggccatgaatatagctgtaaccaaggagagattgaccagattcgggttggttagcatgcttgactactacgtcgagcgccggagcttgatgctgtcg

SEQ ID NO: 125 - DNA, 1302 bp, synthetic construct
  source 1..1302: mol_type = other DNA
atggagttaattgattggattctggcagaccaaaatattgatgccgccatttgggctgtgaaacataatcgtggtgccgcggggattgattccatgcaggtcgacgaactggatgagtatttcaaaaatcatcgcgaggaaatcaaacagcttatccgtgaaaaaaaatacgtacctcaaccggtccggcgcgtatacatccccaagccggacggaaaacaaagaccactgggcattccgaccgtcgtcgatagagttatccaggaggcaattgccatagtgctgatgaaaggatatgatcgctacttttcagagtatagctacggatttcggcctaatcgtaattgccatcaagccgttacgaaagccctggaatatatgaattctggctatgaatgggtggtggatctggacatagaaaagtacttcgatactgttaatcatgataaactcgtttctattctgcgggaacgcataaatgacgatacgactcttcacttgattcgggccttcctgaaagcaggtgttatggaaaacggtctggtttcccctaccgaacagggagtaccgcaaggcggccctctgagccctgtgttaagcaatgtgtatttggataagcttgatcgcgaacttgaaaatcggggcctgcacttttgtcgctatgcagacgactgcaccatctacgtcggatcggaaatggctgcgaatcgtgttatgcgctcaattgcggactggcttggccgaaagttaaaattacgcgttaacatgacaaaaagcaaggttgtacgccctagtggctcacagttcctgggctttagattttggaaaagtccgcgcgaaggatggaaacccaaaccagcaaaagagcgctgtaaacgtctcaaagacaaggtacgggcaatcttatgccgccgcaaagccgttgcggtaccgctcggtgttacgatcacaaaactgaaccaactgatgcgtggctggattaattacttctgtctcgggagcatgaaaggttttatgaaggaatttggcgaatggatgcggcataaggtacgagtggtcatcttaaaacagtggaagaaggcggataccatctatcgcaatttacggaaaacgaacagaatttgtcgctgcgggattagtgatgaagaaatatacaaggtcgcatactcaggtcggggctggtataaaagagcaacacacaatgcagtaaatttcatcctgagtccacaagttttatctcagagaacgaaacagcgcccagggctcgttgatcctctgaaatattatctggcaagatgtacc

SEQ ID NO: 126 - DNA, 1389 bp, synthetic construct
  source 1..1389: mol_type = other DNA
atgggaaccgaaaaccgcgaatcatgtagtcaacgtgattcagctgaaagaaaaggatatgtccgtgcgcatagaagttttaaccgtatttggaaggaacgggatagcgccgaaccagatattctcggcaaaattctggagaaagataatctcaaccgggcatataaacgtgtgaaagccaataaaggcgctccgggcgttgatggtatgacaattgaagccacattaccgtggttaaaagagcacaatcatgaacttgttgaacgtatcagaaaaggaaaatatacaccgagtccggtgcgtcgcgttgaaatcccgaaaccggatggaggtatacgcaaacttggaatcccgaccataattgatcgtattattcagcaggccatgcttcaaccgctgctgcctatctatgagccccttttttcagatgattcgttcgggtatcgccctggtcgaggtgccaaggacgcgatttttcgcatcaaagaatacattgaacaaggctacacaagagccgtggttttggatctgtctaaatattttgacacgctcaaccacaccatactgcttaatctgctgcgtcgccaggtcaaggatgaacgcgtcattcaaatggtgaagcgctaccttaagtctggtgtgatggaaaatggtgtggtcgcagaaaccgaagaaggatcaccgcagggggggaacttgtcccctctgttagcgaatgtgtatttgaatgaatttgactgggaattccatcgtcgcggcgttccgtgcatacgttatgccgacgatatagttctgttagctaaaagcgaacgagctgcggagcgcctgctcgagtcatcagctaaatacctcgaggaaaccctcaagctgaaggtgaatcgggagaagagccgtaccgtatcggtgttcgccatccgcaattttaaatttctgggcttctgtttcggaaagaatggtaagggtatatatattcggattcacggcaaatcctggaagaaagctaaagacaaacttcgtcagctgacgtctagatccagatgcggttctatcgtgcgtacaatggaaaaaatcaaagtgtatatgcgtggttggttaaattattatggcattgctgatatgaaaaataatatggaaagtttgaacggatggctctatcggagaatccggatgtgcatttggaagcagtggaaactgccgaagaccagaaaacgaaaactggctggtctgggagtcgattcacactatgccgcaactattgcctacgatcgcaagggttattggtttaacgcgggtaataaggccgtgaactgggctctgagcaaggaacgcttgaccaattgggggctgtacgatctggctacggcatatcaaagtgtccatgtaaattat

SEQ ID NO: 127 - DNA, 1278 bp, synthetic construct
  source 1..1278: mol_type = other DNA
atgaaacttattgaaactatactcttttcagagaacgtaatcaaagcccagagccgtgtattatcaaataaaggcggagcaggcattgatggcatgcacgtggacgagctggcagaatatatgcgtgctaactgggatggtattaaagaaagtattctggtgagaaaatacaaccctgctcctgtacgccgtgtcgaaattccaaaagtaaacggtggagtgcgtaaattaggcatccctacggtccttgaccgcactattcaacaggccattgtgcaggtgttatcacctattttcgaaaacgagtttcaggaaaatagctacgggttccggccgtgtcgttcgtgcgaacaggcgattttaaaattattagagtatcttaatgaaggttatgagtggatcgttgatattgatttggaaaagttcttcgataatgtaccgcaggataaactcatgagttacgtcggcagagtgatccgtgatccggatactgaatcactgatccgcaagtaccttaagagcggcgtgatggaaaatggaatctacgaagccacagaagagggcaccccccagggcggtaacctctcgcctttattgagtaacattatgctgaacgaactggataaagaattagttaaccgtggcctgcattatgttcggtatgcggatgactgcgtgattgcggtgggcagtgaggcaagtgcaaaacgtgtcatgcggtcagttacgacctggattgaacgggaattgggcttaaaagtgaacgcttcaaaatctcatatatgccgtccaaccaagttgaagtatcttggcttcggcttttatcgaaacccccaaaatcgccagtggcagtcgcgtccgcacgaaagctcagtttcgaaattcgttcgctctctgaagcgcttgtgcaagcgaagctggtcagttagcatgacagatagaattactcgtttgaattatgttacccggggctggatcaactatttctcaatttccttcatgaaattgaagctcgagaaaattgatgagcatttacgtaccatgctccgcaaggtaatatggaaacaatggaagacacctcaaaagcgtgcgtggggtttaagaaagctgggtgtcgacagcgccttagctcgccgtacatctttttgtggggatcgctacgagtgggtagtgcgccgcacttgtgtagcccgcgcaatttccaaagatgtttttacgcgtcgcggcctggtttcgtgccttgattattaccttattagacatagcttgaaaacgtcg

SEQ ID NO: 128 - DNA, 1398 bp, synthetic construct
  source 1..1398: mol_type = other DNA
atggagtcttacctgacgcaagatagagcggagccagaagcaggttgtggtgcgaattcggtatcggacactgagggtgacgggcgcaccgtacaacatgacctggtggaagaggttgtctcttggagtaacctggaagccgcgttaaagcaagtggtgtcgaatcgtggggcccccggggtcgatgggatgacagtcgacgagttaggaccgtggttagaaaccaattatagtgagttggcagaaaaggtacgtaatggtcgatatcgtccaaacccggttcgccggaaggagattccgaagccgaacggcggtgtgcgtgacctcggaataccgactgttgttgatcgtctgctccagcaagcagtgagtcaggttttgatgcctatttatgagcctagcttctcagacacatcatatgggttccgcccgggtcgttcagcacatgacgcaattcagaaagccaaagagtaccttagcgagggcttcgggtacgtagttgatctcgacttagcgagattcttcgacacacttaatcaagattacttgatgaacatccttcgtgagcgtgtccgcgataaggccctgctggagctgattaaacggttccttcggagcggcgtcgttcttccgaacggcctgctccgcgagacacgtgaaggtagtcctcagggtggaccgctctcgccattacttagtaacatataccttgatcggttcgataagctcctggaaagccgcgggcttcgcttcgtgcgttacgcagatgactgcttggtcttcgtgcgaactccgcgcgccggcgaacgcgtccgcgaatcagtcactcgttacttagagggcactttgcggttacgcgtcaaccaagaaaagaccgtagtcggacgtgcggatcaggtgaagtttctcgggttcagattgtaccggcaaaagactgttggtgccaccgttcatgactcctcattggcgagattccgaaaggaagtacgccgcatcaccaaacgtaatcgcggtacgagcctgggcagcgtactgacagagctgaaaacctttacgagaggctgggtggggtatttccggattggcttaagtaagtcacgtgccgaaaagctggatggctggattagacagcgcgtccgacaatacattttcaagcaatggaaaaccctgcgcaaccgagcaagtcagttagtatctttatgtcccgactatttgcggccgcgcccgggtttcacaccatacagttgggtgcgcgagtgtcgccgcgcggcattttcgcgctcgtactggaaggcagtgaactatccagttgtcaagagagctttatctaattcgtacttagccggccttggactgtactccctgtctgagcaattggaaaagtggaataaaggcgtt

SEQ ID NO: 129 - DNA, 1404 bp, synthetic construct
  source 1..1404: mol_type = other DNA
atgaaggatggtatgcagaaaacatccgcattagccaacgactatccgcagcgtaatcgtactgaatcggaacgttatggaggtgtgcaaacctttatgtggatgacggaagacaacattgttgaggtgccttttgacaaggaacacctgttagaagttatcttgtctccggataatctgaataaagcctataaagcggtcgtccgaaataaggggtgcggcggtatcgataagatgtcctgcgaacaactgttgccatggttgaaagccaataaagacgaactcattcgcagcctgttagacggaacttaccgtcctaatccagttagacgggttgaaattcctaaggataatggtaaaatgcgtcttcttgggataccgaccgtggtagatcggatggtacagcaggcgattaaccaggttctgactgtaatctatgaaccacaatttagtaaacggtctttcggatttcgaccgagacgtggctgcccaactgccttacgtgaagtgcaaaaaatcgttaatgaaggttacaagtatgttgtagacttagacctggagagatttttcgacacagtttcacattcaaagttgatcgaaattctcagcagaacattaaaagacgggcgtgttgttagcctgattcaccgctatctgcggagcggcgtcattgacaagggcctgtggcatgcttctgaggagggtacccctcagggtgggccgttatctccactgttgtccaatattatgcttaatgaactggataaagaactggcgcgcagaggtcacccatttgtgagatatgctgatgacagcatgatattttgtaaaacaaagcgcgcagctgagagagtgagagaatcaatcactaagttcattgaaggtaaactttttttgaaagtcaataaagagaaaacagctgtctcatacattaagggggtgcggtacctggggtattcattttatattcataagggcaaatgtcagctgacagttcaccctaagtctaaggcgcgcatgaaatcgcgtctcaaagagcttacgagccggtcaaacggttggggttacgagaaacgtaaacagaagcttaaagagtatattcagggttgggtgggatattaccatctggcggatatgaagcgtttatgcatggaaactgataaatggctccgacgtcgcattcgcatgtgtatctggaaagcatggaagaaacctcgtactaaggtagcgaacctgataaaatgtggcatcgcagagtggcaagcctatcagtgggggaatacacggttggcgtattggcggatcgcccacagccccatcctgttaacagcaataagcaatgatcgcctgcgtaaacaaggatatatgtgccttatggatctgtatctggagtggaaccccaaa

SEQ ID NO: 130 - DNA, 1368 bp, synthetic construct
  source 1..1368: mol_type = other DNA
atgtctcttggtcgtgcagttcatcagaaaccgggtgatacaggacgcagcgcaggccgtcgtggggaggcagagccaaaagctatgagagatgaagctcggaccgcccgccacgaaaccgcgtcgccgggccgtgaagacctgttaggtcaagccttagctagcgctaaccttgaagccgcctggaagcgtgtcaaatcgaacagaggttccgcgggagtggatggattatctatccgtgatacggccgaacatttgaaaatgcactggcccagaattcgtgcctcgttgctggatggtagctatagatcgcagcctgttcgccgtgttcagattcgtaaaccagatggcgggatgcgtgaacttgggatccccaccgttacagatcgcctgattcaacaggcactcctgcaggttctgcaaccgcgtttagacccgactttttcggaacattctcacggctttcgtccgggacgacgggctcatgacgctgttcttgaggcgcagcggtatgtccagagtggctatcgtgtagtggtggacgttgacctggaaaaattctttgatcgcgttaatcacgacatcctgatggcccggctggctcgtcgtatcgacgataaagccgttttacgtttgattcgtagatacctggtagctggaattatggatggaggggtagtgatggagcgctacgagggaactccacagggaggaccgctgagtcctttattagctaatgtgctgctggatgaagtggatcgagaacttgaacgtcgcggtcaccgctttgtccgatacgctgatgattgcaatgtttacgtccgctctcgccgcgcgggtgaacgtgtgctggcgggcttgcgtcggctgtatgaacgcctccacctgaaagtgaatgaggcgaaaactgcggtggccccttcaagtagacgaaaatttctgggttatgctttttggtacggtccgggcggccaagccaaatgtcgcgtagctgataaagctaaagaaacatttaaacaacgtattcgcgaaatgacccgccgtagtggaggtcggtcactccctgatatagtcgagcgtttacaaacatatttgccgggttggaaagcatattttcagcttgctcagacgccaaaagtatttcacgaactggatgaatggattagacatcgcctgcgcgctgttcagttaaaacattggcggcgcgggaaaacgatgtatcgggaactgaaaacgatgggagcaagtgaaacggacgctcgtcaagtggcagctaactcccgtcgttggtggagaaattcgcgcttcctcctcaaccgtgccatgccgatagcatattttgaccgcttgggggtaccccggttgtcg

SEQ ID NO: 131 - DNA, 1413 bp, synthetic construct
  source 1..1413: mol_type = other DNA
atgcaagtggataaggttttcctcatgaccgataacttaagttcaacgcaatgcagaaacgaaactctgcttggggcagacgggatacgggcgagagttgcaggaccaagaccgaagggagtctcggtaaaagcgacgccatcatggacgaaagcagaccccggttggtgtaacatagagaaggtggttaacagtatcattattgacgaagcacttagtaaggttatttccaatcgtggcagtggcggggtcgaccatatcacaacagctgagcttagagattattggagcaagtacggtggtactattcgtcagaagatcgttcagggaacctatatcccccttcctgttaaacgcgtagacataccgaagccaaacggtgataagcgaatgctgggcataccatcggtaatagatcgcgtgatacaacaagctttggttaacgtcttggagcccgtatttgacccacaattctctgagtttagttacgggtttcgcaagggtcgcaatgcgcagcaagccgtactgcaggcgcagtcatacataaaggatggacaccgttgggtggttgagcttgacctgtctaagttcttcgatagagtgaaccatgacattttaatgtccagagttgcacgagtggtcgaggacaagcgcatattaaagttaattcgccggtatcttaacgcgggtattatggaagacggtatcgtaaagccgcggtccgagggagttccgcaaggcgggcctctgagcccactgatgagcaacattatcctgaccgagctggatcgtgagttggaaaagcggggccataagttctgtcgttacgcggatgactgcaacatatacgtgaagtccgaagaggctgcaaagagagttctcgaaagtgtgaccaaatatcttgaaggtggcttaaagttgcgggtgaaccgcgacaagagcggtacctttcgtccgtacgagtctgttttcttgggctactcattccaccgtcgcaactggacgcggatcgtcgttgctgaggaatcaattaagcgcttgaagaccaagttaaagattatctatcggcacagccggggtacatcccttggcaccgctattaagaagctcaaccaaatccttcgaggttggagaacgtatttcaagcttgacacgcgcaaaggattcttcgaaaagcttgacatcaacattcgcacacacctgcgagtactcatatggagagcctggaaaagaccacgcactcgggagcgtgagttaagaaaacgtggccttgacgctttcaacgcatggaagtcggcgaacaacggacggggtccctggtacaacgcacgggcgccccacatgcgcatagctattccgaacgctctgtttgtaagactgggtctttataatctgtcttcaatgggtaccgtc

SEQ ID NO: 132 - DNA, 1287 bp, synthetic construct
  source 1..1287: mol_type = other DNA
atggtgagtctggaaaagatcttagaaccatcaaatttaactgaagccctgaagcaggttgtaagtaacaaaggagcgcctggcgtagacgggatggcagtagatgagcttgagcctttcattcgcaatcatccaggtgtgttgagccaggccatccgtgatgggtcttatagaccaagcccggtcaaacgtgtgtatattcccaaggataatggtgagaaaagacccctcggaatcccaaccgttgttgatcgcttagtccagcaagctatcgcacagaaactgtcggaggaatacgaacctaatttcagcgataactcctttggcttccgaccgaagcggtgtgcccacgacgctctgaagcgcatcgtcgataacgcgaacgacgggtatgagtatgtcatagaccttgatctggcgaagtttttcgacactgttaatcatagcaaaatgatacaggtattgtctgaaaccgttaaggatggacgagttgtttcactggtccatcgattttttcgtgccaaaattaatgacgaaggcaaaattattaaaccggccattgggatgcctcagggagggcccttatctccggtgtgcgccaacatactgctgaatgaactggaccaattattagatggccgtggtcatcggtatgtgcgctatgcagatgatatgttgcttcagtttagatctctgagagctgccgaacgtgttttcacctcagtgaaacggtttatcgaggagaagctgtttttgaaagtcaatgtcgagaagaccaagatctgtcatctgtcaaaagacgtgaaattcttagggtattcattctacaagtcgtacgacaaagatgacctggatggcaaaggtaaatggaaattagtggtgcacggcaagaaacgtcgttcttttgagcagacaatcaaaacattgcttgatcgaaaatgtccaaaaggactggaaagatgtaaagaagatttgaaactgtatttatgcggttggaccaattatttttacatgggactgtcccgttcgcggcgccaaagttatgacaaatggattcgacgtcgaatacggcagttatactggaaaatttggaaaaaaccgtccacccgcattcgcgcactgatgcaactggggattgagcgttccaaagcaaatgagtggggtaatagtagcaaggcgtattggcgtgtagccggcagctggatcttgaaacgctcacttaccaatgatgttctccagaatttggggtggatatggctgggcatagcccgcaaatggagtccgcaa

SEQ ID NO: 133 - DNA, 1413 bp, synthetic construct
  source 1..1413: mol_type = other DNA
atggaaactcgccatggcatgaagtatcggcaactgcatattgaggattacttaggagagattcctgcggaacagggacgagggaccggtgtgtatgcacacgaatggattactggcaacccggacaccaacactgatttttggaccgataacctgttagacgctatacttagaagtgacaaccttaacgcagcctataaacgcgtcaagtcaaatcgcggaactggaggtatcgatcgcatgcaggttgacgaacttctcccatatttgcgtaatcaccgtgacgagttgatacgccagctgagagagggtaagtacaagccgaatccagtccgtcgggtagagataccgaaagaaggtaaggataaagtacgcaaactcggaattcctaccgtggttgatagaatgattcagcaggcaattgctcaggaactgacagctgtatatgaagagcagttctctgaaaattcctacggttttcgtccgggtcgtagtgcgcacgacgcgcttgaaaaatgcagagaatatgtcaatgagggctatatctatgcaataagtatggatctgcaggcctactttgatacagtgaatcattcgaaattaatagaagtactgagtagaaccataaaggacggccgcgttatttcactgattcataaatacctgaaagcaggtgttatggaagatggtggcttccacgcgaccagtgaaggtgtgccacaaggcggtccactgtccccgctctgtggcaatgttatgcttaacgaacttgataaagagcttgaacgacgtggtcacaagttcgttcggtatgccgatgattgcattgtactgtgcaaatccagaaaatcagccgaacgaacacttaaacatataatcccctatataactaaaaaactttacttaaaagttaatcttgaaaaaaccactgtttcgttagtaagcaaagtgaaatacttagggtatggtttttaccgtaataagggtaagtgtcgtatgagagttcatccaaagtcgatcagaaagatgaagaatcatttgcgtgagttgaccgtacggggcaataaatggtccaatccggaacgggaggaaaagttacgccgttacactacgggatggattaactattatagactcgctgatatgaagagcttgatggaaacaactgacgaatggctgcgtcatcgaattcgggcggtgtactggaaacagtggaaaaaagttcgtacacgctataaaattttgagaacgctgcacttaccagaatggaaagttcatgaattggccaactgtcgtaaaggaacgtggcgtgctgcgtccacgttgaattcggtactgaccaaaaccgttatcgttgatcggcttggctatccaagtatgaccgcgcattacctgaaagtccgggtgaattac

SEQ ID NO: 134 - DNA, 1305 bp, synthetic construct
  source 1..1305: mol_type = other DNA
atgtgcgaaatacgaaaggtggaaacggacatggagctgttggaagaggtgttgagcaaagacaacttgaacaaggcatataaacaggtatacaagaataaaggtgcctcgggtgttgacggagttacggtagacgagttgtttagctacattcaagaacacaaagaggaaattctgtggaagattcgtaatagaaagtacaaaccacaaccagttcgtagagtcctcattcccaaagataacgggaagatgcgtaagctggggataccgtcagttatagatcgagttatccaacaagctatcgtgcaagttctcacacctatttatgaagagcagttctctaaccatagttacgggttccgtccaaaacgttcatgcgaaatggcagtagtgcaagccctggagtacttcaacgacgggtatgactggatagttgacatagacctgcaatctttcttcgacgaggtaaaccaggacaagttgataggcatcattagacgaacgattaaggacggtgaccttgtatccttgatccgtaagttcttacaatctggtgttatggagaatggagtactgcaaccgaccaagaagggtacacctcagggtggaaacctttcccccttactctccaacataatgctgaacgaactggacaaggagctggaagctcgacgcctgcactttgtcagatacgcagatgactgccttattttggttaagtcggagaaggctgccaatagagtaatggagagtataaccaagttcattaccaagaagcttggtctgaaagtcaatgtggagaagtccaagattgccagaccggacgacattaagtaccttggtttcggtttctacaagaagatcaatcaaaatgagtggcgcccgaaaccgcacataaagtcggtacagaagttcaagacgaagctccgtgacattcttgttcgtagccgttcaattagtctcgacgatcgactgttgcgccttaagcagctcatttacggctgggtcaactactttcgtatagcggacatgactattttgcttagagacatagacggtaacattcggcgcaagcttcgggttattatctggaagcaatggaagaagattaagaaacgctacgcgtgtttgagaaaactcgaaataacacatagagatgcttacgtgacggctaactcacgatcaggttactatcacatctcccatacccgcgttttggaaaaggctatttccaaagagagattgaataagcggggccttgtgaactcgttggattattatctgaaagtccacatcatcacgaat

SEQ ID NO: 135 - DNA, 1389 bp, synthetic construct
  source 1..1389: mol_type = other DNA
atgtcgaaggcgatgcgtcagatgccggggcagcctggtcgtgtgtgcgtcgcacatggtgaagcagtgcgcgatttaatttctgacgaagccggtggaccccctcgcgaacatccggataccggctcagcaacgcctcccactggaccaggcggtttattggcagctatgttaacccgtcaaaacttgcagctggcctggaaacgggttaaggccaacaaaggtgcagctggcgtggacggattggacatagaacagactgcgcagaccctgcggacgcgttggccggatattcgccagtcattactgcaaggtcggtatcgtccttcacctgtgcgaaaagtgatgatcccgaagcctgatgggactcaacgtgagttaggaataccaactgttacagaccgtctgatccagcaagcacttttacaggtgttacagcctctgattgacccgaccttcagcgagcactcgtacggctttcgtccaggccggcgcgcgcatgacgcggtaaaagctgcacgtgcttatgtccaatccggaaagcgtgttgtagtggacgtcgatctggcgaagttctttgatcgggtgaatcatgacatactgattgatcgcttgaatcgtcgagttgatgatgctggcgtcatccgtcttgttcgagcttatcttaacgcaggaatcatggacgggggtgtggtggtcgaccgtcacctgggtaccccgcagggagggccgttaagtcctctcctggcaaatgtgttacttgatgaggttgacaaagcgctggaagcacgtgggtactgcttcgctcgttacgcagacgactgtaatgtctatgtaggttctaaaaaggctggcgaaagagtaatggcctatccgtacttgcgtcgattatatgtcaatcttaaactgcaaataaatgaagccaaatctgccgtagcttcagcgtttggacggaaattcttaggatacgcgttatgggtcgctaaagggcgtgaagttaagtgcaaagtggctcaaaaacctctccaaaatttcaaggcgcgcatccgtcaactgacgcgtcgcagcgggggtcgttctatggcccaggttgtcgataaattgcgcccataccttttagggtggaaggcatattttggtatggcgcaaacaccgggagtctggcggggcctggacgagtggctgcgtcatcgtctccgggcaattcaactgcgtcaatggaagcgacctaaaaccatacatagagagctgaaagcactgggtgcatcagacgacgtcgctaaacaggtggccggtaattgccaccgttggtggcgtaattcagatggagttatcaagcgtgtcttagcgattgcttattttgatcgtctgggtgtgccccgtctgtca

SEQ ID NO: 136 - DNA, 1350 bp, synthetic construct
  source 1..1350: mol_type = other DNA
atgcaacaaaagacgtacagagatccggatgcgggaagacgcggtgaagctcctgacgccggcagccaaggcgcggagactgtacaggcccctactacccgtgagtcaccgagttcaacagcgtggttgatggaagccatatgtgaaccggtaaacctgcggcatgcactgaaacgtgtcaaggctaataaaggtgccgcgggggctgatggcatgagtgtgtcagagttgcccgactacttacgccatcattggcctgaactgaaagcccagctgcttagcggtagttatcgtccgtctcccgttagacgtgttaccatacccaaaccggggggaggcgaacgtctgctgggcatacccacagttgttgatcgttttatacaacaagcaatgatgcaggttctgcaggcacagtgggatgcaacgttttctgattccagctatggattccgcccaggtcgcagtgctcaccaggccgtgaaacaggcacagaaatatatcgagtctggatatagttggggtgtggatcttgaccttgaaaagttctttgaccgcgttaaccatgacgtcttaatgtctcgcatcgctaagcgcgtgagcgataaacgggtgttaagtttgatccgaggctaccttaatgccggtgtgatggaagcgggccttgtgatgccagtaactgagggcaccccgcagggaggacctctgagcccgctgctttcaaatttgctgctggatgacttcgataaagagctggaaaaaagaggtttgaagttcgcacgctatgctgatgattgtaacgtgtatgtcaaatcggagcgagccggaaatcgcatgatggcaggtttaactcattggttaaatcgtaagctgaaacttaagctcaatgctaaaaaatctgcggtggcactgccagaaacccggaaatttttgggttattcatttcgccgcggtcgaaaagtttggtgtgtcgtttcgcctgaaagcgtaaaacgatttaaaacccgtattcgggagctgacgggtcgtaataccggtaagagcttggaacagcttatcgaaccgttaaaacggtatttaaccggttggaagtcatattacggactgaaccagtggcagacattaatgcgggaccttaatcgttggattagacgccgtctgcgatctgtcctgtggaaacagtggaagaccggctcgaaacgttttaaagaattacgtcgaagaggagttagcaaggatcttgcggcacagacagtcggatcttgtcataaacagtggcgcataagctgctcccctgccttgtcaattgccttacccaatcgtttgtttgtccgactgggtttgccagaactg

SEQ ID NO: 137 - DNA, 1407 bp, synthetic construct
  source 1..1407: mol_type = other DNA
atgcgttcgcaggaggggcggagacaacaaaaagcccccgaaggggcctacctgtgggaggaaatggtcaaaccatggggtactacgggtggtccgtcaccgtcatccgcacaaggtggggccactccccgaggaggtcagggcagcgggttaatggaacaggttgtggaacgcagcaatatgctggctgccctccgccgcgttgaacgaaacggaggggccccaggcgtcgatgggatccctactgaacgcctcagagatcagatccgtgcggaatggccgcgaattcgtgaagaactgctggccggcacataccgtcctaaacccgttcggcgcgttgaaataccgaaacctggcggaggtaaacgtttacttggaatcccgacggctgtagaccgcttgattcaacaagcacttctccaggttttaacgcccatatttgatcctcaattttccgaggcctcctatggtttccggcctggacgccgggcccatgatgccgtgcgaaaggcccgtcagtatgttgaagaaggatacgaatgggctgtcgatctcgacatcgagaaatttttcgatcaggtaaatcatgacatactgatggcacgtgtagcacgcaaagtgacagataaacgtgttctgaccctgattcgtcgttatctgcaggcgggggttatggtcaatggtgtcgtcatcgaaacaggtgagggtacaccacagggtggtcctttgagcccactgttggcaaatattcttctggatgatttagataaggaattggaaaaaagaggccacaagtttgttcggtacgctgacgactgtaacatatatgtgaaatccaaacgggcaggggaaagagttatggcgagtatccgtaagtttctgcaggaaagactcaaactgaaaataaacgaacagaaatctgcggtggatagaccgtggaagctgaagttcttaggattttcgatgcataagcgcaagaccggtgaaatcctgatacgcctggccccccaagcaattgaaagagttaagggaaagatccgagaaatcaccgctcgcaataaacccgtatctatggcggaacgtatagaacgacttaacacttacttgggtgggtggattggatacttcgccctcgcagaaacgccgtcggttttcgaggagatagagggctggatgcgccgccgactgcgtatgtacctttggaaacagtggaaacgcgtgcggactcgctatagagaactgcgtgccctcgggttgtccgaatgggttgtgcaccagttcgctaatgcacgcaaaggtccttggcgcatggcccatggcccgatgaatcgtgcgctgggcaatgcctattggcagtctcaggggttaatgagtttaaccgaacggtatcagagtctgagacaagcc

SEQ ID NO: 138 - DNA, 1377 bp, synthetic construct
  source 1..1377: mol_type = other DNA
atggtaaagcccttacgccttgatcgtagagctgaaagatcaccgacgccgtcagaaggaatgtctgaggccgttggggaaggagtctgggaacaggtattcgagcgcaagaacttactgtcagcactgaagcgcgtcgaggccaatggtggagcccctggggttgacggcatgactgttgaagcgttgcggccctacctcaaggctcactggctggagctgcgtgcagcattagacagcggtaactaccgtccctcacctgtgcggcgtgttgagatagggaagcccgatggtggagtacgcctgctggggataccaaccgttgtagacagattaatccagcaagccatcggtcaggtcctcactcctttgttcgaaccggtgttttcacctcattcctacggattccgcccaggtcgccgtgctcaggacgctgtggaagcagctcaagggtatataagagagggatatacgtgggtggtagatatagaccttgagaagttcttcgaccgagtgaaccacgataaattaatggcaagagtcgcccgcgcagttaaagacaagcgtgtattaaagctgatcagaagatacttgcagagtggggtaatggtcaatggtgtggtgatggagacggaagagggaacaccacaaggtggtccgttgtcgccgttactcgcgaatattatgcttgatgacctcgataaagaactggagcgtcggggtcaccgatttgtgcgttatgcagacgactgtaatatatatgtgcgtactgagcgggccggcgagcgtgtcatggacagtgtgcgaggctttcttgagaagaaactcaagttgaaggtcaacgagaagaagtcggctgtggcccgtgcgggtcagcgtaaattcttagggttctcctatttctaccgcaagggagaagttctgattcgtgtcgctgagcaagcgcaacaacggcttcgagaaaagttacggggcctgacgcgtcggactcggtcaggccgtctggaagagataattcaacaactcaaggaatatatgcgcgggtggatgggttatttcagactggccgacacccctagtgttttcgcgggattagatcactggctgagacggcgcctgcgtcaactgctgtggaaaagatggaagcgtgggactacccgttggcgtgagcttgttagtctgggtgtccctcggcgccttgcgggactcggagcgacaggaagttcaccttggcgtatggccggcactccagttgtccacatggctctttcgaatgcgttttgggatgcacaaggtctttgcagtttcacggagtactaccaccaactgcatttaccaagacgcactgcgggttgcggtcctgcatgtccggtcgtc

SEQ ID NO: 139 - DNA, 1368 bp, synthetic construct
  source 1..1368: mol_type = other DNA
atgggtgaagttagagttaaaccggggggtactccgcgtggtcgttctatagatcgccaggatttaaaattaatcttaagacgggaaaagtatcgtatggaccttatggagcaaatgctgtcgcgagagaatatgctgcaggcattgcgtcgcgtagaagcaaacaaaggagcagcaggaattgacagtgtcagcactcgccagcttcgtgcacatgtggtccagcattgggaaactacaaaagcaaaacttttggcgggtacgtataaaccaagcccagttcgccgcgtcgagattccgaagccggacggaggcgtccgtctgctgggtattccgacggtcatggatcgtttgattcagcaggcaatcttgcaggttctgacccctatatttgacccgacgttttccccacactcttatggttttagaccgaaacgtcgtgggcatgatgcagttcggcaggcccaggaatatatacgagaaggttatagatatgttgttgatatagatctcgagaaatttttcgatcgcgtgaatcacgatatcctgatgtctcgtgtagcgcgtaaagtcaaagacaagcgtgtgttaaaactcatacgggcttaccttaaagcaggcattatggcagaggggattcgagtgcgcagcgaagaaggtactccgcagggtggcccgctgagtccccttctggctaatattctcttagatgatttagacaaggagctcgaacgccgccagcttagattcgtacgttatgctgatgattgcaatatctatgtcaaaacccgtcgggcgggtgagagagttaaacggtccattacaaagtatttggaaaaaaaactgaaactgaaggtaaacgaggcaaaaagcgctgtggatcgtccatggaaacgcaaattcttggggttctcatttacatttcacaaagaagctcggattcgaatcgcgcccaaatcgctgaaacgagtaaaagacaaaatccgtagtctgacgagaggcaaccatttgacatcaatggaaactattattgaagacttaaatcgttatctcatgggatggatgggttattacgcgcttatggacaccccatcaactctgaaagcattggacgaatggatacgacgcagactgcgcttagttttatggagccgctggaaacgcgtacgtacgcgttaccgtatgttacgcgcactgggtctgccagaacgtgatgtgcataaactcgctaatacacgcaagggagcatggcggacctcaaagactccacagatgcataaggcactgggaatcgcatattggaagagtcagggcctgatgtcgctcactgagcgttactttgagatcagacaaggctggagaaccgca

SEQ ID NO: 140 - DNA, 1359 bp, synthetic construct
  source 1..1359: mol_type = other DNA
atgaaagagacaaaaaaatgcgatgaatctcgtcagctgaacatccagacgggccaccttcaaaaagatcgcgtcgaattagagagctatgccaaagcgccctccattagtgtgaccagtgacaatcgccagaatgctcgccgtgagtgtcattacggactgttggaaaatattataagcagtgaaaatctgaacgaggcatttaaacgtgttaaaaaaaataaagggtcacacggtgaagaactgagacagagtattgcggacggcagctataaacccaatccggttcggcgagtcgaaatcccaaaggataacggtaaaattagaccccttggtattccaacggtggtagaccgcgttatacaacaggccatttcacaagtgttaacacctatatttgaaaaaaaattttcggaaaatagctacggcttccgtcccaacagatccgctcatcaagctatccttaaatgtaaagagtatatggatgaaggctatcgttgggcagtggacattgacctggaaaaatatttcgatacggttaatcatgataaactcatcggactgatttacaaggaaataaaggatattagagtaataggacttatacgcaaatatcctaatgctggcgttatggagaaaggccttacgtctttgacccttgagggtgtgccgcagggggggaacctcagcccgttactgtctaatattatgctcaatgagctggatatggaattagaaagacgcggtcttcggttttgccgatacgcagatgactgtaatgtatatgttaaatccaaaaaatcagctgagcgtgtgatgaagagcattacaaagttcattgaaaaagatctgaaactgaaagtgaacaaagagaaaagtaaagtagatcgaccttggaaactgaaatatctgggctataccttttataccaaaaaaggagaaatggggattcgtgtacatcaggtatcaatcaagaaactcaaaggtaaattaaagagtatcacagggcgttccaatgccatgtccatggaactccgcgctgtgaaactgaagcagttgattgtgggttggattggctattttaaattagctgatatgaaatccactttacgcgaacttgatgaatggctgcgacgccgtcttcgcctgtgctattggaagcagtggaaaaaaatcaagactaaacatgacaaccttgtgaagttaggcgttgaaaattggaaggcatgggaacatgcgaacacacgcaaaggctattggcggatttctaactcgccgatacttgccaccaccttgaccaacaaatatctgcgcgaacaggggtttatcacgctctcagaacgttacagccaggtgcgc

SEQ ID NO: 141 - DNA, 1365 bp, synthetic construct
  source 1..1365: mol_type = other DNA
atgagcatgtgtgaagctctgagacagatgccggaacgctcaggacgtgtccctcttgcagatggcgaggcaggtcgggcctccgcgtctgatgaagcgacacgaccccgacatgaaaccggaagcacaggttccgccttactgatggcagctctgactcgtgaaaatctgcagcaggcatggaaacgtgtgcgagcgaataaaggtgccgcaggggttgatgggcgcgacattcctgaaacagcctgttaccttcgaaccgcttggccggtgattcgtgatcagctgctgcagggtacttatcgaccttccccggttcggcgggttactattccgaaacccgacggaggggagagagaactggggattccgacggtgacagaccggctgatacagcaggcgttgcttcaggttttacaacctttactggatcccacattttccgagaattcatttggttttcgccctggccgtagtgcccaggaagccgttgtccgcgcacaagcatacgtccagagcggccgtcgtattgtcgtcgacgtagaccttgagaaatttttcgatcgtgtcaatcatgacatcctcttgggtcgtctgcagaagcgtattggggatgccggtgtgctgcgcctgattcttgcttatctgaatagcggtatcatgcagaacggtgttgtcgtatcgcgctatcaaggcaccccacagggggggccactgagtcctcttttagccaatgttcttctggacgaagttgataaggagcttgaacgtagaagtcactgttttgttcgctacgcagatgatgctaatgtttatgtccgtagtcagcgcgctggcgaacgcgtaatggcccttctgcggaaaatgtatgccaaactccaccttaccgtcaacgaggcaaagtctgcggttgcatcggctttcggacgcaaatttttaggattcagtttttgggtcgcaccgcagggcgaaatcaagtgcaaagtggcagcaaaaccgatggcgacttataaacaacggatccgtcagctgacgcgacgctcggggggacgtagcatggcagaagttgtagagaatttgcgcccgtacgttttggggtggaaagcgtattttcgcctttctcaaaccccgggcgtgtggcgcacgctcgacgaatggatgagacatagattgagagcaattcagctgaaacattggaagcgtggccccacaatgtatagagaattaaaggctcttggagcatcagaaaccgttgctcggcgtgttgcggggaatgcacggtcgtactggcgcaatgccgaccggttattgaagaccattctgaccatagcctactttgatcgtcttcgcgttccacgactgtca

SEQ ID NO: 142 - DNA, 1257 bp, synthetic construct
  source 1..1257: mol_type = other DNA
atgatgatggaacaagtcgtatcgcggcagaatatgcttgcggcttaccaaagagtggttcgcaatcatggatctgcaggcgtcgacggcgtgactgtggaggatttagccgaatactcccgtctgcattgggagcgcattcgtaccgaacttctggaaggacgctatcagccgcaacccgttcggaccgttatgatacctaaaccgggaggcggggagcgggaactgggtataccgacagttatggatcgaatgatacaacaggcagttcaccaggttatgagtccgcagttcgatgcgggatttagcgaagcctcctatggctttcgacctggtcggtcagcgcatggtgctgtggagcgcgcacgcgaacacatgaccgcaggtcatcgctgggttgttgatattgatttagagcgcttcttcgatcgcgtcaatcatgacgtcttaatcgcgcgggtttcccataccgtaaaggataaacgtgtcttgcgccttatcgggtgctatctttcagcaggtttaatgcagggtggggtggtttcaccgagatcggagggcactccacaaggcggaccactgtctcctcttctgagcaatattttgctcgacgtcctcgataaggagctggagcgtcgtggccatcggtttgtcagatacgcagatgattgtaatgtatatgtgcagtcccggcgggcaggtgagcgggtgatgggctcgctccgtgtatggctggaaaaaagactgcgcctgaaaataaatgcatccaaatctgctgtcgatcggccttggcacagaaaattcctgggttattctgtcacgacgcaaaaacgaccgcgtttaaaagtgtctgctgaatcagttaaacgcatgaaacaacggcttcgtgagctgctgcgcattggtcgcggcagatcacttcgtactgtcattgccactgttgccgtttacctgcgtggttggctggggtattatcgtaaagccgaagttcgcaatgtttttgaagatctggatcagtggcttagaagaaaattgcgtcgcataatgtggaaacaatggaaaaaacctaaaacacgttatcggaagctgcgtgcgtatggtgtagccccggatcaggcgcgccgttctgcatggaacggacgaggtccgtggtttaatgctggtgcatcacacatgcatcttgccgttccaacgaagctgctgcgtaactggggattaccatcactgcttgatgaacatcagcggcttcagagactg

SEQ ID NO: 143 - DNA, 1452 bp, synthetic construct
  source 1..1452: mol_type = other DNA
atgatctccatgcaaaccgtcaaagccgaagtaagtgaacgggccgccgagacgcaatcgacggaccgaaagagtacaaagctgccactgggcgctgacgttggcgccgccacgagtgagcaaacaaagtctgaggggcattctcttatggaacaagtagtcgaacgctcgaatctctggttagcgtatcaacgggttgtccgaaataagggtgcgcctggggtggatggtttaacagtaggcgaattcaaggattggctgaaaatgcactggccaagtgttaagaaagcacttctggaaggtgattacctgccccggccggtacgacgggttgacatcccaaaggccagcggcggtatgcggactcttggggtacccacagtcgttgaccgtctgattcaacaagctctgcatcaagttctgcaaccgctgttcgaaccgacgttttcacaaggttcgtacggttttcgtccccgtcgcaccgcccaccaagccgtacgtcgtgcccagtcatatattcgtgagggcaagcgttgggtggtcgatctggacttggagaagttctttgaccgtgttaatcatgacgtccttatggcacgggtggcgagacaagtcagagacgcgcgcgtgttgaagttaattagacgcttcctggaagccggaatgatgcgcgaggggttagtcgagccacggagcgagggaacgccccaaggtggccctctgtcacctttattgtcaaacattctgttgacggatctggaccgcgagttagagagacgaggtcttgcgttctgccgatatgccgacgattgtaacatatacgttggctcacgtgttgctgcagagcgtgttatgggtggtattagaaccttccttgaagaggttttacgactccgtataaatccagcgaagtcagcggtggcgcgtccctgggaacgtaagttcctcggtttctcgttcactgctcagagagaagcccgcttaagaatcgcactccaatccgtgcgtagattgactgaacgtgttcgggagttattaagagctggccggggtcggagtcttgcccatactattgacactctcaaccctttactgcggggatggatcagctacttccaattgactcagtgtaagggtgttttagaggagcttgacggttgggtacgccgcagattgcggtgtgttctgtggcgacagtggaagcgtagccgcagtcgtgcaagacacatgcgggccttgggtttagacgctgcccgcgcacgatgtagctcacaaaatgggcgtggcagttggtggaatgcaggggcaagccatctgcaccaggcccttccggcagcttacttcaaattaggtgcggggttagcagtagctagagccactgccactccggtttgcagtctgaatcgtcgcatgcgcaatagaacgtctggcggagtcggcggtcgacgtgca

SEQ ID NO: 144 - DNA, 1401 bp, synthetic construct
  source 1..1401: mol_type = other DNA
atgaaagaagggaaacagaagatttcgaaagacacctgtcaacagaaagatcgcgcggagcccgatggctatgcgggcgggcagacattcatctggatgaccgaaaataacattactaatgtcgacaactcaaagtacggtttacttgagtacattttgtctccacaaaacctgaacgcggcctttaaacgtgtaaaaagtaataaaggttccggtggcattgacaaaatggaagttgaatcgctgggcgactaccttatttgccacaaagaatccttgatccagagcatcttagatggtaactaccggccgaatccggtccgccgcgtggatatcccgaaagataatggtcagaaacgcagcctcggtattcccacggtggtcgatcgcgtggtccaacaggcgattgcgcaagttctgtcgccgatctatgaaaaacaattttccccaaattcttacggctttcgcccgaaacgtagcgcccaccaggctttaatcaagtgtaaagaacatattacctcagggtataagtatgccgttgacatggatctggagaaatttttcgacacggtgaaccagtcaaaactgatcgaaattctctcccgtaccgtgaaagatggccgtgtggtatctttaattcataagtacctgcgcgctggcgtggttgttcgtaataagtttgaagagagtaaaatgggagttcctcagggcggcccgctgtcgccactcttgagcaatatcatgctgaacgaattagatgaagaactggagaaacgcggtcaccatttcgttcgctatgcagatgatatgctgatcctgtgcaaaagtattcgctctgcgaaacgcactaaagcaacgattattgcatacattgaaggccgcctcttcctgaaagtaaacaaggacaagacctgcgtggcctatatcagcaaaatcaagttcctggggtatagcttttacgtcaataagaagaaaggtcgtctgcgtctgcatccgaaaagtctggccaaaatgaaagagaaaatccgtgctttaactagccgtagcaatggatggggcgatgcgaaacgtaaacttgagctcaaacaatacatcaccggatggcttaactactttaagctggccgacattaaaagtctgctgtcgcgtattgatgaatggtatcgccgccggctgcgtatggtaatttggaaacagtggaaacgggtgcgttcacgtggccgcaacctgattaaacttggtattgcaaagtataaagcgtgggaatatgctaacacgcgtaaagcctattggcggacctctaacagccctatcttgaacacatccatcacgaatgaacgtttgaaacaggcagggtatattttctttgcggattattatcgcaaagtgaacggtgtcaat

SEQ ID NO: 145 - DNA, 1395 bp, synthetic construct
  source 1..1395: mol_type = other DNA
atgaaagggcgtatgcagaaaatttctaaagatacttggctgcagaaagaccgtgctgagccggatagctatgctgcggggcagacctttatgcgtattacggagaacaatctgactgatgtgaccacgttggaagatggattgctggagcaaattctgtcgccatcgaatcttaatcgcgcctataagaaggtgcgtagtaacaaaggtaaaggcggcgtggacaaaatgggtattgaacacttgcaagactatcttgtagagaatcgcgtggaattactgcagtctatccgcgatggcaagtatcgtccaaaaccggttcgtcgtgtcacgattccgaaagagaatggtaaaaaacgtctgttaggtctgccaaccgtagtcgacaaagtgattcagcaggcaatcactcaggttctcagcccgatctacgaaaaacagttctccgcatacagctacggctttcgtccggggcgcaatgcccatcaagccctgaaaaaatgccgtgattatatttctgatggtcatatctacgcggtggacatggatctgcaggaatttttcgataaagtaagtcacagccgcttggtagaaattctgagccgtaccatcaaggacggccgcgttatttctctcattcataagtatcttcgcgccggcgttatgattggtaataagttcgaagaaacggaactcggtgtcccgcagggcgggcccctgtcacccctgctgtccaacatcatgttgaacgaactggacaaagagctgcaacgtcgcggtcaccgcttcgtccgctatgcggatgatctgatgatcgtgtgcaaaagtaaacgtagcgcgggccgcacccttcggaacatcatccctttcatcgaagataaactttttctgaaagtgaaccgcgagaaaaccaacgtgagtcatgtttccaaaatcaagtttcttggacacaccttttatcgttcacatggtaaaggccgtttccgggcacatcctacgtcgattcggaaaatgaaacagcgtttaaagcaattaacatcccgttcgaatggctggggcgaagatcaacgcaaggaaagcttaaaccactacgttcgtggatgggtcaactattttaagatggctgacatgaaatcattactgcggaaaatcgaccgctggtaccggcgtcgtttgcgtatgtgtatttggaaacagtggaaacgcatccgcaccaaaggcaaaatgctgattaaactggggctgaacaaatggaaagcatgggaatacgccgatacccgtaagagtcactggcatattgcgaatagctttattctcacacgcaccattactacacatcgtctccgccaggcgggttacccgtttctgctggattattattcaaaagttcgcacg

SEQ ID NO: 146 - DNA, 1410 bp, synthetic construct
  source 1..1410: mol_type = other DNA
atgcgtggcgtgaaacccaccatggaaaagaaactgaccaaaatgaaagtttctaaccagtctggctacaccggtttttcgattttcagcttgggggagatttgtttagaagaagttactgatggttataatctggagaaggcgttgaaatgtgtggcgcgcaataaaggtgccccgggcatggatggagtcgaaaccaaagattatgccctgcatcggcaaattgccggttttaaagatcttatcgacgatatttccgccggtacatatcgtccaaaaccggtcaaacgggtgtatatccctaaagaaaacggcgataaacggccgctgggtattcccacagttgaggatcgtgtggtgcagcaggcactggccaacattctgagcaagtattacgaagaggaattttcagacaacagtttcggctaccgcccgggccgtggttgccgtcaagcggttaaacgcgctttgaaatatgtaaacggtggccgccagtgggtaatcgaccttgatctgtcgaagttttttgacaccgtcaaccactcaaaactgctgcagatcctttcagagaaaatcaaagatgggcgcgtgatttcactgattcataagtttctgcgcactccaatctatgaaaatggggtggtaagcccgaaaagtaaacaaggtaccccgcagggcggaccggtatccaccattctcgcgaacattatcctgaacgaatgcgaccagatgatggacaaagaaaatattaagtttgttcgctatgcggatgacatgatgatcttttgcaaaagtaaagaagctgccgaacgcaccctgaacaaggtgacaaagttcttagagaaaacgctcttcctgacggtcaataaagaaaaaaccaagatcttatggtacacgcatgggacacagtttttgggtttcacgttgtcccagtatgtgccaaaacacattaagaaaatcgcaccgaaatgtaaagtttacgttaaagtccatccgaaaaaacgtgagaaatttcaaaaaggcatcaaagaaaccctggatcgtcgcgcaccgggcgggattgaagaaacgaagaaaaagtttaaccaaaaaattcggggatggttcaactacttcaaaggcagcattccacagaagtggatggaagagacggatgcatggatgcgtcgccgtatccgtcagatgtattggaaacaatggaaaactcctcagaatcgtatggaaaatttcagcaaacttaatcccaaaagtccttctcggcgtgattacgcgtactctaacaatagctattggcgcatggctcgcacgaaacagatgcacaatgcactctcgaaccgtaccctcactagcatgggctggctgtcgttacaggaactgaacgcgcagtacctgcaagagatgtccggaaat

SEQ ID NO: 147 - DNA, 1272 bp, synthetic construct
  source 1..1272: mol_type = other DNA
atggagctgttagaacagattctgagtaatagtaaccttaacgaagcctacaagaaagtttatcgcaataagggggcgtctggagtagatggcgtgacaatcaatgagttgaaagaatatcttcagaataacaaacacaaacttctctctgaaattcgtgcacgtaagtataaaccgcaaccggtgaaacgtgtggaaattccgaaagcatccggtggtgtgcgcaaactcggcattccaactgtggttgatcgcgttatccaacaagcgatcaatcaagtgttaacgccgatctacgaggagcaattttccgaatccagctacggctttcgccctcgccgtagcgctcagggcgccgtcttacgttcgctggaacttattaacgatggttacgattgggtggtggatatcgacctcgaacgttttttcgataccgtccatcatgaccgtctgatgaatatcatttcccggactatcgaagatggtgacgtgattagtctgattcgtaagtttttagtaagtggtgtaatgattgacaacaagtatgaggataccatcattgggacccctcagggtggtaatctgtcacccctgctgagcaatatcatgctgaacgagctcgacaaagaactggaaattcgtggcctggattttgtccgttacgcggatgattgcatcattctcgtatcgtcaaaaaaatcagctaatcgtgtaatggcaagcgttaccaatttcatcgaaaaaaagctgggcctgaaagtgaacgtcacaaagagtaaggttgatcggccgaacaacatcaagttcttgggctatggttactattatgacggtaaagaaggaaagtatcagttgcgcccgcacgaaaaatctattcagaaattcaaacggacgttaaaacgtttgaccaaacgctcgtggtcggtgtctctgaactatcgcctgtttaaaatccgccaggtcattatggggtggatccagtactttaagtatggcaaaatgaaaagcaaacttaaagttatcgacagcaaactgcgcgcccgcattcggattgtcatttggaaacaatggaaagttccaaaaaaacagatcaactcactgatgaaactgggcatcagcttggacgaggccaaaggcattacgtactgtcgtaaaggctaccagttcatcggacactcgaaagttatccagaaggcgattaacaatagccgtctgaaaaaacgcgggttaacgtccgcgctggatcattatctgaaagtgcagaccgtcatt

SEQ ID NO: 148 - DNA, 1272 bp, synthetic construct
  source 1..1272: mol_type = other DNA
atggagctgttgacccagattttgtccaacagtaatctcaacgaagcatacaaaaaagtctatcgcaatcagggtgcgagcggggtggatggtgtgaccattaacgagctgaaagagcaccttcgtgagaataaacacaaactgctcagcgaaattcgcactcgtaagtataaaccacagccggtaaaacgtgtggaaattcctaaagcgaacggtggtatccgcaaacttggaatcccaacggttgtcgatcgtgtcattcagcaagccatcaaccaggtgctgacccctatctatgaagagcaattttcagatagtagctacggtttccgcccgttgcgtagcgctcaaggtgcggtcttacgctcattagaattgattaatgatggctatgattgggtggtggatatcgatctggaacgcttctttgatacggtacatcatgaccgtctgatgaatatcatttctcgcaccattaaagatggcgacgttatctcactcattcgtaagtttctggttagtggcgttatgattgacaataagtacgaagacacgattattggaacgccgcagggcggcaatctgtccccgctgttaagcaacatcatgcttaacgaactggacaaacaactggagatccgcggcctgcactttgtgcggtacgccgatgattgcatcattctggttaaaagtaaaaaaagcgcagaacgtgtaatgacttctgtgacgaactttatcgaaaaaaaattaggcctcaaagtcaacgcgaccaaaagtaaggtcgatcgcccgaataacattaagttcttgggatacggttattactcggactttaaagaagggaagtatcagctgaagccccatgaaaaatcgattcaaaaattcaaacgtaagcttaaacgtttgacaaaacggtcgtggtccgtttctttagactatcggctgctgaaaatccggcaggtaattatggggtggattcagtactttaagtatggtaaaatgaaaacaaaactgcgtggtattgactctaaactgcgcgctcgcatccgtgttgtgatctggaaacaatggaaggtgccgaagaagcatatctcatccttaattaaactcgggattctgaaagatcaggccaaaggcattacctattgccgtaaaggctatcagttcatcggccatagctgtgtaattcaccgtgcaatctccaattcgcgcctgaaaaaacgcggcctgactagcgccctggatcattaccttaaagtgcagaccgttatt

SEQ ID NO: 149 - DNA, 1269 bp, synthetic construct
  source 1..1269: mol_type = other DNA
atggaattactggacaagattttggaacgggagaacctcaacaaagcatacaaacacgttaaggcaaacaaaggcgccccgggtgtggatggagtgactgttgatgaagcatatgaaaacattcgccagaataaagaaaaatggctgcatcagattcgtaaacgtacctacaaaccgcagcctgtgcgtcgtgttcagattccgaaagaaaacggtaaaatgcggaatctgggcattcccactgtgtttgatcgtattattcagcaagcgatggtacaggtactgagcccgatttttgaagagcaattttccgaaacctcttacggcttccggccaggacgctgttgcgaaaacgcggtggtaaaagcattagaatatctgaatgatgggtatgaatggatcgttgatatcgatttggaacgcttcttcgataccgtggatcaggatcgtctgatcaatattatcatgcgcacgatcaaagacggagatgtggtgtcgctgattcgcaagtatcttagtgccggcgtaatggacaaaggcgtcaccaaagcgaccgagaaagggacgccgcaaggtggcaatctgtcccctttactgagcaacattatgttaaacgagctggacaaagaactcgaagcgcgtggcctgcgcttcgtccgttatgccgacgattgtattatccttgtcaaaagtgagaaagctgctaatcgcgtgctggagtccatcacgaagtacatcgaaaagaaactgggtctgaaggttaatgctgaaaaatcgaaagtgacgcgtccgacgaaaacaaagtatctgggttacagcttctggaaagatacaaaagggaagtggaaacccaaaccgcacttgaaatcttatcagaaaattaagcgtaaacttaagcagctgacctgccgccgtatttcaatctcacttgacgaacgcatcaagcagattaattacgcgattcgcggctgggtcaattattttcgtatcgcaaacatgaaaaatgcgatccaagagatcgacgagcacctgcggactcgtgttcgtgtgatcatttggaaacagtggaaaaaagctagtcgcaaagaaaaagccctgttacaactgggtgttaaaccagatattgcccataaccttgcgaacaccagcaaaggctatcaattggtcgccaaaaccgactggctcaaatttgcgatcaacatcgaacgtctgcgcaagcgcggtttgatttttctcagcgatcagtaccagaaagttcatgtcgagatt

SEQ ID NO: 150 - DNA, 1389 bp, synthetic construct
  source 1..1389: mol_type = other DNA
atgaatgcggaaaatctgattgatgaatcatgtcctcaacgtacgagtgcggaacatgaaaaatacgccggggcgcagtccgccgccccgcgtgaaagcgaagctgaagatcgcgcggacctgctggagcgtatccttgatcgcgacaatatgaatgaagcgtttaaacgcgtgcgcgcgaacaaaggcgcgccgggcatcgatggtatgaccgttgaggctgccttaccctggctgatcgagcatggtaaagaactgattgacagcctgcgtgacggcacctataaaccgcagccggtgcgccgcaaggaaattccaaagcctgatggtggcatccgtaaactgggaattcccaccgtgattgatcgcatgattcagcaagccatcacacagcagctgaccccgatctacgaaccgatcttttctgacaacagctatgggtaccgtccgcaccgcaatgcgcagatggcgatccgcaaagcaaaagagtatgcagacgaaggctacaccgtggccgtcgaaattgatctgaccaagtattttgacacgctgaaccacgatctgctcatgaacactgtccgtgaagaagttaaagacaagcgcgttctcgagttaattaaaaaatacttgaaatcaggcgtcatggctaacgggctgctgatcaaaacagaagaaggttcaccacaagggggcccgttgtccccactgttggcaaacatctatctgaataagtatgatcatgagatgactcgccggggcgtcaaggaaattcgttatgccgatgatatcgttttatttgccaaaagtaaacgggcaggagaacgcctgctggagtcttctcggcgttaccttgagaaaaagctgaaactcaaattgaactcggagaaaagcaaagtagtaagcacgtatagtccgcgtaagttcaagttcctgggttatgcactgggcaaaagtcgccaaggtaccttcattcgcatccacgctaaagcgctgaagaaagcgaaagagaagttgaaagagctcacgtcgcgctcccagggtcgtaaaatttgcgaggtgtttgcccgcctgaaacgcttcgtgaacggttggattaattactttggaattgcgcggattaaaaaaacccttgaagattgggatggctggttgcgccgtcgtattcgtatgtatatttggaaacagtggaaaaaaactcgccggcgtaaagaaaaccttatgaaactcggcgtacctgaatggcgtgcatgcgaagccgcgtactcccgtaaagcatattggcgtagcgccaaacatgcgtcagttcattcggctttaacgaatgaacgtttagctcgtgcaggttattacagcttatctgaacggtacgaatcgctgcacctttatgat

SEQ ID NO: 151 - DNA, 1377 bp, synthetic construct
  source 1..1377: mol_type = other DNA
atggttcgctcacgtaaagaacgtatgcgtgaagaagataaaagtcgccccaacacgcgtctgtgtgagcaattaattagtctggcaaatattcagcaggcggtcaagaaagtaatgcagaataaaggttcagctgggattgatggcatggaagtgacggagcttccgtcgtatcttgaagcgaattgggccctgattcgtgagcaaattgtgacgcgtacttacaaacctaagccggtgctgcgccgtgagattccaaaggataatggtggcatgcgcctgctcggtattccaaccgcggtagatcgtgtgatccagcaagcgttggtccaggttctgaccccggtctttgaacctaccttttctgacttttcgtatggatttcgtccggggcgtagcgccgaagacgccgtgcgcctggctcagacctatatgagcgaagggtacaagcacgttgtagatcttgacctctcgaagttcttcgatacggtggaccatgacatcttaatgggcctcatcgacaagcacatggatgataaagacgttcgtcgtctgatctatgtctatttgaaaagcggtgtcatgacgaacggctccatggccgtgaccgcgctgggtaccccgcaaggcggcccattaagcccgttgttatctaatgtttatctgacaccgtacgatcgggaattggagaaacggggtctgcgtttcgtccgctacgcagacgattgcaacatctttacgaaaagtaaaatgtccagctatcgtgttcgcgactccgctaagagttatcttgaacggaaactgaaactgaaagtgaacatggagaaaaccgaggcgcggcgtgcagtcggcagtacatttctgggtttcacttttcgcacttatggcaaacgtggtaaacttgggatgacagtgccccatgaaaaaaaactgaaaaagctcgaggatcgcattcgtctggtgaccaagcgcaatcgcggcgtttccattggcatggttattcgtgatctgaactcaattttgcgtggttgggtaggctactttgcccgctctgcaattaaaaattatttggaacgtctgatggaatggatccgccgtcgtatccgccagtatctttggaaacaatggaaaagcggaaaaaaccgcaaacaccgcctgcgtcagctcggtgtagatgaatggaagctgaaaaaatggaaactggggtcgaactcttactggaaaatggcgggaaccatgaactacctgatcgacaaagaatcaattcatggccgctatggtctggttgatatcttaggatattacaataaactgcatgcccagcggatggaaagcgatggtatcgtgttagatgtgcgctacaacagcttattcggc

SEQ ID NO: 152 - DNA, 1302 bp, synthetic construct
  source 1..1302: mol_type = other DNA
atggaattgatcgaagtgattctgagtaaagaaaatctgaaccgggcgtataagaaagtcgtggccaacaaaggtgcatccggcgtcgatggcgtgggggttgaagagctgggggactatattcgtgaaaacaaagatgtaatcattacatccattcgcaatcgtacctacatgccgaaaccggttcgtcgtgtgtacatccctaaagaaaatggcaaacagcgccccctcggcattccgacagtgttagaccgcacgatccagcaagctatcgctcaaccaatttgggatatctatgaagaaatcttctctgaatatagctacggctttcgcccaggtcggtcgtgccatgacgcgatccgtcaggccctgtactacctgaatgacggatatgagtgggttgttgacattgacattgagcagttctttgataaggtcaatcacgataaacttattcagatccttggggaacaagttaatgattcgacgaccttaaacctgattcggaagtacctcaaagccggtgtaatggagaaaggcctcgagaaagcaactatcaccggtgtacctcagggtggaccgttaagcgttgtatgctctaacatctatttggataaactggataaggaactggaaaagcgtggcttgcgcttcacccgctacgcggatgatgtcctgatttttacgaaaagtgaaatggctgccaaccgtgtgatgaaaagcatccgctcatggctggaacgtaaactgtttcttaaagtcaacggcaccaaaaccaaagtggtacgtccaacgcgctcgaagtatcttggttttacttttgtgaaaaattcaaccgagtggaaagtgcgtccgaccaatgagaaaaagaaaaaactgaagaagaaactgagcgagtatcttaaacgcggcaaagcggtagcacgtcccttagcggttactattaaacgcgtcaacgaaattgttcggggctggattaattactttcgcattggtatgatgaaacagttcatgcaggagctgggcgaatggttgcgccataaaattcgtgtgattgtcgtcaaacagtggaaacgtccgaaaacgatctatcggaatctctcttatctgaattggaagtataagatcggttgtaaacaagaagaaatttttaaagtggcgaactcacgcctgggttggtaccgtcgctgtggaatgagcgtggttaacttcatcatctccaaagacttgctggaaaaccgtattaaggatggggtgggcctgctgaacccgttaagttattatctggttaaagtgggtatt

SEQ ID NO: 153 - DNA, 1416 bp, synthetic construct
  source 1..1416: mol_type = other DNA
atggacgcggagcgtcaacagggtcgcgcctaccagctcactttcaactttgaaggtgacgcggagacgctgcggcatgatcagggcggcgatgacggaattggtaccgcacgtcccgaagaaccgcagacaagcactgcgtccgatccagcacgcgctctgacggagcgtctgatggaagaagtgacgcgcccggagaatcttaatcgtgcgtaccgcaaagtgaaagccaacaagggcgcccctggtgtagacggtatgaccattggcgaccttcgtgcgtggattgctatgcataaagaagaactcattgccagccttctggatggctcatatcgcccgcagccggttcgtggagttcagatcccgaaaccaggtggtggggtgcgccaattaggtatcccaaccgtggtggaccgtctggtccagcaggccatccttcaggtgctggagccgttactggatcccaccttctccccttcatcatttggctttcgcccaggacggggcgcgcatgatgcattgaaacaggctcggcagtatgtcgcggacggacgcgtgattgtcgtcgacgtagatctggaaaaatttttcgaccgtgtcaaccacgatatcctgatggcacgcctggctcggaaggtagccgatcgtcgcctgttaggcatcattcgccgttttctgcaggcgggcttgatgcaggaaggtgtttgcgtggctcgccacgaaggcactccgcaagggggcccgctgtcgcctctgttagcgaacttgctgctggacgatcttgataaagagctggaacgtcggggtcatcacttctgtcgctatgccgacgattgcaatatctacgttcagagcaaggcagcggggcaacgcgttctgggttccgtaacccgtttcctcgaggtggttctgcgcctgcgtgtcaatcgtgataaaagtgaagttgcgtacattgaagaacgtaagttcctgggttatcgcctgctcagcggcggtcggctggggattgcgccgaaaagtctcgagcgtgcgaaggatcgtattcgccagattacccgccgtaatcgcggggtaagcgtggatcgtatgacctcggaattaaactcgtttctgacgggctgggttagttattttcgtcatgcagcatgtaaaagtcaccttacagaattagatggctggatccgtcgcaaactccgttgcgtgcgtctgaaacattgtaaacgctctaaaacgttggccgattttctgggctctcacggcgtcgcccaacatacggcatgggtgaccgcactgtctgggaaaggctggtggcgtttgagcggatccccggctgcccatcaagccatggatcaacgctggtttgcgtcgttgggtttaatcaacctggctcaccgtcatacaaccttgaaccgt

SEQ ID NO: 154 - DNA, 1470 bp, synthetic construct
  source 1..1470: mol_type = other DNA
atgtccaaagccgagtatcggcagctgacatttgcgttcgctgactctcctcagggggccggtccggcggctctgaccgacgtgtcggtcggtaaagcttggctggccttaactgcggaagttaaggaaggcaatgattccgccgcatggaccgcagacacgggtcgtctgctggagtcggcgacgagtgccccaaaccttgcacaggcgttgttgaacgttgcacgcaacaaaggcgcggccggtgtcgatggccgtagtgtggatgaagtagttgccgccggcccgcgtttactgccttacctgcgccgggaactgctggcggggacctatcgtcccggggatatccgtcgtgtgtggatcccaaaacccggcggcggtcagcgtggcctgggcattccgaatgtggtcgatcgttgggtccaacaagctgtgctccaagtgctgcaaccaattttcgaaccgacctttcatgcatctagccatggcttccgcccgggccgcggagctcagactgcaatcgatgaagctaaaaaatacctggcagaaggtttctgtttcaccgttgatatcgatctgagcaagttctttgaccgtgttcatcaccagcgtttgctcaaccgcctcgcccaacaggcgtcagacggccgcattttgaaactggtgcaccggatgctgaaggcgaaagtggttctgccggatgggacgcgcattaccactgaagagggagcgccgcaaggtggccccctcagccctattcttagcaatattgtcctggacgagctggaccgtgaattagcacgccgtggacttcgcttcgtgcggtatgcggatgattttagcgtatttgttcgcagtgaacgcgctggtcgccgtgttatggatagtatccgcaagttcatcgaagggcgtttgcgtctggaagtaaacgaagagaaatcctcagtctcacgcccgaacgatctcacgtttctgggttttcatcttggtaagagtccggacggcaaagtgaccgtcaccccaagccaacgtacaaaagaacgtatggacctgcgtattcgcgaactgacaccgcgtacctggggccagtccgttgccgcttgcattgaaaaagccaattcgtatcttcgcggatggtttggttattttcgtctgtgcacggaagaaggtgtgctcagctttggccgttttgatgcacacatccgccgtcgcatccgggcggtaattgtgcatcagaaaaaacggcctcgccatctttatcgtcacctgctggatcgtggggtatcttgtggaatggcggcgaaagcggcctttcagcgccgtggtttgtggcatcgctctatttcgttcggcatgcacaaagcctacccgaatgcatggttcgcggatcgcttaatgtcattgaaagaggagtggcagcgtttacacccgccagagcaggtgagctacaagcagttattactgtttgag

SEQ ID NO: 155 - DNA, 1413 bp, synthetic construct
  source 1..1413: mol_type = other DNA
atgggggcaggggtgcccgaaaaaaagattgaaattagcgaagtcgacctgcatggtggaagccgcaaactgccgcgtggacgtatctctggtgcgaatttccctggcaccgaggggcagccggatccacggaaaccagatctgattgaaatgatgctcgaacgtggtaacctgttggaagcattgcaccgcgtggaatcgaatcgtggtgctgcaggggtggacggtttaaccgtgtcgcagctgcgccagtatcttcgcgttcattgggcaggaattaaggaacaactgctgaaaggcgagtatcagccgcgtccggttcgtcgtatggacatccccaaagcgggtggcggtacgcgtatgctgggcattcctaccgtactggatcgtttgatccaacaagcgctgcaccagatcttaagcccgctgtgggagccgtggttcagtgcgcacagttatggttttcgccctggccgttccgctgcgcaggccatcaaaacagcccagaagcatgtgcagtctggccatcgctgggttgttgatatggacctggaaaaatttttcgatcgcgttaaccatgatgtactgatggcgcgggttgctcgccgggtcaaagaccagcgtgtactgaaactgatccgtcgctacctggaatcaggcattatgttagggggcatggtggagcagcgtacagagggcacaccgcaaggcgggccgttatccccgctgctgtctaatatccttcttgacgacctggataaagagttggaacgtcgccgccataagttctgccgttatgcggacgattgtaacgtctatgttggtagccaacgcgccggagaacgtgtcatgaaatccctgacgcaattcctgcaggcaaaactgaaattaaccgtgaacccgaccaaaagtgccgtcgataaaccatggaaacgtaagtttctcggcttcagtttgactgcagaacgcggtattcgtattcgcgtggcgactccgtcagtcaaacgcctgcaggataaactgcgcgccaagtttcgtgagggccgtggtcgcaatcttcgtacctttattgagggcctgaaaccgcttctgcgtggttgggccaactacttttcagtagcggaaactcgtcaggtgtttgagaaattagatgaatggatccgccgtaaacttcgttgcatggaatggcgcaagtggaaacgccctaaaacccgtctccagcgtttgacggccttaggcttagatcgcgaacgggcgcggttgggcgcctttaacggtcgtggcccatggtggaacgctggcgcttcgcacatgaatgcggcactccccacgagctactttcacaaacttggtctgattctgctcacggaagaagtggattggcaaaccgccctgcggaccgctcgcagcctc

SEQ ID NO: 156 - DNA, 1392 bp, synthetic construct
  source 1..1392: mol_type = other DNA
atgcggaccgatgacgccgaagcatatgtttcggcggcctcgacggggaaaggccgtcgcaaccgcttaggttcgggtgccggagcagaagtgcggacggctgctgttggtcgtactaaacccgaggcgctccgcctgatggaagcggccgtcgagcgtagtaacatgctgtgctcctacgaacgcgttgtgaaaaataaaggggcgcctggtgtggatggcctgaccgttgctgcctttaaaccttggttgcaagctcactggccacgtgttcgtcaggcactgttggcaggtgagtacatgcctgcggccgttcgcaaggtcgaaattccaaaaccgcagggcggggttcgtatgctggggattccgacggttttagatcgtctgatccagcaggcattacaccaggtcctgcaaccgctgtttgagccagagttctccgagtcaagctatggcttccggccgggccgcaacgcacatcaggcagtaaaggcggcgcgcgggtatgtcgctgaaggcaaacgttggaccgtggaccttgatttggaaaaatttttcgaccgcgtcaatcacgatgtacttatggcacgtgtagtgcgtaaagtgaacgacgagcgggtaagcaagcttattcgtcgttatcttgaagcaggtctgatggaaggtggagtggtgagcgcgcgtactgaaggcaccccgcaaggcggtccgttgtcccccttactctcgaacattttgctgacggatctggatcgtgaactggaacgccgtggtcatggcttttgtcgctatgctgatgactgtaatatctatgtaggcagcaaacgttcaggccagcgcgtcatgcgtgcgatcacagcgtttctggaacagcgcctgaaactgaaggtcaatgcggctaaaagtgccgtggcccgcccatggcaacgtaagttcctggggtactctatgacctggcacaaaaagccgaaacttaaaatcgcgcatcaatcacgtgagcgtttcgccgaaaaagttcgtcgcacgttacgtgaagcccggggtaagagtctgaaacgcgcggttgaacgcctcaacccggtgctgcgtggttgggtggcgtactttcgcctgaccgaagtaaaaggtgtgctcgaagaactcgatggctggctgcgccggaaactgcgggccctgctgtggcgtcgttggaaacgcaactacacccgtgcgaaaaatctgatgcgccgtggtttaagcgagcgtcgcgcgtggctgtcagcaacaaatggccatggaccgtggtggaatggcggcagctctcatatgaacgaagcctgcccgaaaagttggtttgaccgcatgggacttgtcagcttattggatactcagcgtcgcttttcttccgtgtct

SEQ ID NO: 157 - DNA, 1401 bp, synthetic construct
  source 1..1401: mol_type = other DNA
atgaccactgaaaatcgtcgtaaggaagaagcgaaaacggaagaatcaggccggaatccggtgctgcctctgaactcggccatggttgatgaaactaaacgggaagaaagtttactcccggataaccaacggtacattccgattcctaaaattgaaggagttgtttcggattataatatccaagaggcgacgaaagctgtgattcgtaacaaaggggcgccgggaattgatagtatcaccacggaagagatcgagggcattctgcagaaagaatggcccaagattaaacaagagatcttagacggcaagtaccgcccaagcccagttcgtcgcgttgaaatcccaaaaccggacaaaaatggcgtccgtaaacttggcatcccgaccgtcatggaccgtattattcagcaagcaatctaccaggaactgatgtttacattcgaggcaatcttttctgagaatagttatggttttcggcgttcccgcaatgcgcagcaagctgtgctcaaagcgcaaggatatatccaggaagggtacgaatgggtggtcgacatggatcttgagaaattctttgacaaagtaaaccacgatattctcatggccaaagttgcgcgccgcatcaaagataagaaaatcctcttactgatccgccgctacctgcaggcgggcgtgttagaaaacggtctggtaaagccttcggaagagggtacaccgcagggtgggccactttccccgttgttgagcaacattatgttggatgattttgataaggaattagagcgccgcggcctgcggttcgtgcgctatgccgatgattgtaacatctacgtgaaaactgaaattgcaggacagcgcgtgatgaaaagcgctatcaagtatctgacaacccgtctgaaactgaaggtaaacgaagaaaaaagcgccgtcgcacatccgtgggagcggaagttcctgggttttaccttcaaaaaagaagaaccggggaaaattgccattcatgagtcccgtatcaaacgtttgaaagacaaaattcggggtctgacgaaaaaaatgcgtgatggtaatcttacggtaagcattcgtaagtttattatgcctattgtccgcggctggaccaattatttcggcatcgccgaggaacagggtatttttgcgagcctggacggttggattcgccgtaaaatccgcggcattcagtggcgccagtggaaagaaccccgcacccgcttcaaaaaactgaagtcactgggcattaaagaacagaccgcgcgtaaccatggttattcttcgaaagggccgtggaaaatggcacgttcccacgtgatgcacaaagtcttttcaaacagcaccatcgaaagtatgggctatattcccatggccaagctggtttgcgctcgttct

SEQ ID NO: 158 - DNA, 1227 bp, synthetic construct
  source 1..1227: mol_type = other DNA
atgtacgaagcactgcggcgcgtcgaaggcaataaaggtgccgcgggcatcgatggaatggaagtaaaagatcttcgtccgtatctgaaagcccattggcaagaaatcaaagggcagctgttagaaggtacctataagcccaaaccggtgcgtcgtgctgaaattccaaaaccggacggcggtgtccgctttctggggattccttgcgtgattgaccgcttaattcagcagtcactgttacaggtactcacgcctattttcgaccccggttttagcgaacactcatatggttttcgtccgggacggggcgcccatcaggccgttcagaaagcgaaagaatacgtcggcgagggttatacctatgttgttgacatcgatctggaaaagttcttcgaccgcgtgaatcacgatgcgttgatggcgcgcgtggcacgcaaagttgaggataaacgtgtactcaaacttatccgtgcctaccttaatagcggcatcatggtcgatggcgtgtgcattcgcaccgaagaagggaccccacaaggcggtccgctcagtccgttgctgtccaacgtcatgctggacgatcttgataaagagctggagaagcgtggtcatcgtttcgtgcgttatgcggatgattgtaatatctacgtgaaaagtcaacgtgcaggagaacgcgttatgggtaatgttaaacgttttctgggcgagcgcctgaagttaaaggtgaatgaggcaaaaagtgctgtgggcaaagtaaacgcccgtaagtttctggggtttacactgtctagcggcaaacgctcgcgcatccgcatcgcgagcaaagctctggagcgtctgaaagatcgcatccgcgaattgactcgtcgttcttggggtattcgtatgggcgaacgcattcggcggctgaacgtctatttgcggggctggattggttactaccgtttggcggaaagcctgtccgtgttgaaccaattagacggctggatccgccgtcgcctgcgcgtttgcttattgaaacagtggcgcaaaccgaaggcgcgttggcgtaaccttgtgaagcttggtgtttctgaggaatgggcctatatgatttcggggtcgcgtaaagggtgttatcgtctgtccctgactcaccagctgaacaaagcgctgggactcgaatactggaaaaaacagggcttactgtcactggctgaaacgtatctgaacattcgtattgcactc

SEQ ID NO: 159 - DNA, 1317 bp, synthetic construct
  source 1..1317: mol_type = other DNA
atgaccgaggcagttggggaaggagtttgggagcaggtatttgaacgcaaaaacctgctctcagcattaaaacgtgtggaagccaacggtggcgcgccaggtgttgatggcatgactgtcgaggccttgcgtccatatctgaaagctcactggctggaagtgcgcgcagctctggactgggggtcttaccgcccttccccggtccgtcgtgtcgaaattggtaaaccggatggtggcgtacgcctgttagggattccaacggtagcggaccgcctgattcaacaggcgattggacaggtcctgacgccgctctttgagcctgtgttcagcccgcattcctatggatttcgtccgggacgtcgtgcccacgacgctgttgaagcggcgcaaggccatatccgtgaaggctacacctgggtggttgatatcgaccttgaaaaatttttcgatcgggtgaatcatgacaaacttatggcgcgcgtcgttcgcgttgtaaaagataaacgtgtgctgaaactgattcgtcgctaccttcagagcggtgtgatggttaatggtgtcgtgatggagacagaagagggcacgccccagggcggtcccctttcccccttgctggccaacattatgctggacgatcttgataaagaactcgagcggcgtggccatcgctttgttcgctatgcggatgattgtaatatctacgtccgtacggaacgtggcggcgaacgcgtgatgaattcggtgcgtggctttctggagaagaaactcaaattgaaggtgaacgaaaagaaatcggccgtggcacgggcaggccagcgtaagttcctgggttttagctacttctaccgcaagggcgaagtgctgatccgcgtagctgaacaagctcaacaacgcttgcgcgaaaaattacgcggcctgacccgtcgtacccggagcggccgtctcgaagaaattatccagcagctgaaagaatatatgcgcgggtggatgggctattttcgtttagcagataccccgagtgtattcgcggggttagatcagtggctgcggcgtcgtctgcgtcaattgctgtggaaacgctggaaacggggtactacgcgttggcgtgaactggtgtcgttaggtgttcctcgctctctggcgggacttggtgccactgggtcaagtccgtggcgcatggccgccaccccagtcgttccgatggctctgagtaccgcgttctgggacgcccagggtctgtgtagctttaccgagtattatcatcagttgcactggccgcgccgtacagcgggttgcggtccggcatgcccggtcgtg

SEQ ID NO: 160 - DNA, 1452 bp, synthetic construct
  source 1..1452: mol_type = other DNA
atgagcagcctgcgtaacgagcaaggccgccagaaactgtcagatcgcgaaaccggtgaaccgacacagcaggtcaaacctgaaggtgaagtgcagtcagcggagccttttccggcgcgcgatgatggcaaaagtgacgagagcgacggcctctctttatcgaaacccgtgtgggaagcagtgttcgcccgcgcgaatctgtttgcagcgctgaaacgcgtggaatcgaataaaggtgcagccggggtagatgggatgaccgttaaagagctgccggcataccttaaagcacattggttagaagttcgcgacgctttggaaagcggcaagtatcgcccgtccccggttcgtcgcgtggaaatccctaaaccggatggtggtgtgcgtcagctgggcattctgaccgtgctggaccgtctgattcagcaagccatcgctcaggttctgaccccaatgtttgaaatggcgttctcccccaactcgtatggcttccggccgggccgctcggctcatcaagctgtagaacgtagtcaggaatacattcgggaaggatacgactgggttgtcgatattgatctggaaaaattctttgatcgcgtaaaccatgatatgttgatggcgcgtgttgcccgggtcgtgaaagacaaacgtgtattaaaactgattcgtgcataccttgaaagcggcgttatgttaaacggagtggttatggatacggaagaaggtacccctcagggcggtccgttaagtccgctgctttcaaatatcatgctgaccgacctggatcgcgagcttgaggaacgcggccagaaatttgttcgttatgccgacgattgcaatctgtatgtcactccagcactggccggcggagcgcgcgagacggaacgtgcgggcgaacgtgtgctggagagcgtaaagcagtatttggagaagaagctgaaactcaaagtcaatcccaaaaagagtaaggtggagcgcgccactcgtgccaagtttctcggtttcagtttttggaaacgtaaaggagaagtttttattcgcttggcgaaacgtaccaaagaacgcttcgcggagaagatccgttaccttacgaaacgtacccggtcagggaaaatggaagatatcgtctccgaagtaaaccgctacactcgtgggtggatcgggtattttcgcctggcgaccacaccatccgtgtatcaagaaatggatgaatggattcgccggcgcttgcgtcaaattcagtggaaacgttggaaacgtggtcgtacgcgttaccgtgaactggtccgcctcggtgtgccgccaaaacgtgcagctttaggtgccgtcggcacgtctccgtggcgtatgtctcacagcccgatcattcacgaggctctctctaatgcgttttggcgcaacacgggcttggagtccatcacagaacggtataaccaattccgttatagccac

SEQ ID NO: 161 - DNA, 1398 bp, synthetic construct
  source 1..1398: mol_type = other DNA
atgaagtcaggtggtgaatggcgccagcagctgttgccgtttgaagcggaagcaccgaccggtggcgcgggccaaaactcagcagggccggcaggtgtcagccgtgctccatggcgccagccggatcctgcatcggctcgcccgacgctgctgcgtgaaatcgttcgcgaacgcgttcttgaggccgcttggaaacaagtgcgccgtaaccgtggcgcgccgggtattgacggaatgcgcgtaggcgattttgaagaatggattggcgtacacggtgatcaggtgcgtgccgagattctggcaggaacgtatgaaccgcagccagtacgtcgtgtggaaatccccaagcccggcgggggcgttcgtttgctgggtgtgccgacggtgttggaccgcgtaatccaacaggcccttgtcattgttctcacccctatcttagacccgacctttagtgagagcagctatggcttccggccgggtcgtagtgcacatggagcggtggcggcagctcgtcgccacattgcggatggttaccgctgggtagtcgaccttgatctgagcaagttcttcgaccgggtcaaccatgacgtgctggttgatcgtttatggaagcgcctgggcgacgggccgttactcagtttgattcgtcgctatcttaaagccggcgttctgatcgagggtgtggtggtcgagagtgttgaaggcactccccaagggggacctctctccccactgttatccaacgtcttactggatgagtgggatcgtgagctggaacgccgggggcatcgctttgtgcgctatgctgatgattgtaatatctacgttcgtagccgccgggcgggcgaacgtgtgctggcatcctgccgtgattttctggagcgtcgtttgcgcctgaaagtgaatgaagaaaaaagcgcggttgcccgtccgtgggcgcgccaatttttaggctactccgtgaccaacggcaaaaaaccgaagcagcgcctggcgaaacgtagcgtcgtccgtctgaaagaacgtgtgcgcgccattacctcacgttctcgggggatttcgctcgagcagatgttgcgcgaattgtcccggtatcttcgtgggtggtcaggctacttccgccggattgaaacaccttcggttttagaacagctggattcttggatccgtcgtcgtgtgcgctcgtttctgctgaaacaatggaaaccaggtcgcggacgtcgtcgtgcgatccagaaactgggtgtggatgacggctggcgtctgagtgcctctcgtaaaggtccatggcgcctgtctcgcggtaaagtaattagcgcggccctgccgaatgctactctggaacagcgtggcctcgtcaatcttaaacaggaatggaaacgcctcgccgaactgttc

SEQ ID NO: 162 - DNA, 1245 bp, synthetic construct
  source 1..1245: mol_type = other DNA
atgaccaccgaatgcacgatggaagcgatgttcaattggctgaacctcgaggaagcactggaagccgtcaagcgtaataaaggggcggccggcatcgatggaaaaagtatcgctgaaactgagcaacacattgaagaatactggacccaaattgaagcgaaacttatggcaggtcagtatattccgtctcaagtgaaaggcgtgaaaattccgaaaccgaatggggagaaacgcttattgggtattcctaccgttcaggaccgtgtgattcagcaagccatgaaccagcagctgagcaaagcctttgaccgcgagttttcgatcaacagctacggcttccggccctatatgtcggcacagcaggcggttaaacaggcgcaactgtacgttcaacaaggcaaacactgggtcgtcgatattgatatctccgccttctttgatgaagtcaatcacgacatcctgctccatcagctgtcacagaaagtaacggacaagcgggtgcaaggcttaattcgtaagtaccttaaaaccggtattatgattgagggtaagctggaacgccgtggaaaaggcatgccgcagggtagtccgttgtcgcccctgctggctaacatctacctggatcgcttagacaaagaattggagaaacgcggactgagcttctgtcgttatgcggatgatacatccctgtatgtgagctctgaacgtagtgccaagcgtgtcctggaatcgttgacccagtggattgaaaaacatttgaaactgaacgtgaaccaatcaaaaagtggcacgggtcgcccatgggaaagccagtttctggggtttcgtattggtaaagatggcgaaatcggtatcgctccaaaaagtattgaacgctataaagaaaaagttcgtaaactgtgggatgctcgtcagtccctgacgtcaaaacagttaattgagcagtggcaaaagtattccatcgggtggtggaattattttaagcttgcgactaagcgctggaccatccggtgttgggtaggttggacgcgccgtcatattcgcaagtgcttctggcagcgctggcataataaaaaaggtcggctgaacgcgctccgtcgcctgggcgttagcgagtatcttcagaaaacagcatcgtcctcacgtggcgcgtggcgtatcgcgtctagccctgctctgcataaagcattaagcaacgcaactcttcgccgttacggcctcgacgtgccgccgttatctgccgcc

SEQ ID NO: 163 - DNA, 1266 bp, synthetic construct
  source 1..1266: mol_type = other DNA
atgggcaaacagcggagcatgacgccacatcagccttctttactgatgctccgtattgttgagcgtaataatctgcagcgcgccctgaaacaggtgcaacgtaaaaaaggcgctccgggtgtggacggcatgacggttgaggaactgccggactacctgcgtgcccactggccacagttgcgtgagcaactggtgggtggtacctatcgtccgaagccggtgaaacgtgtgttgatcccgaaagctaatggtaaacaacgtaaacttgggatcccgaccgtggtcgatcggttcgtgcagcaagcgattgcgcaggtcttatcagagtattgggaaacgaagtttcatccggactcttacggcttccgcccccaacgcagtgcccatcaggcaatccgccgcgtgcaggcgtatacccgtgcagggtatcgcacggcggttgacctggatcttgaatcattttttgatgaggttaaccacgaccggctgatgcgtgctcttcatcgcacccaccccgacaccgatgttttgcagttagtaaaccgttaccttaaagcaccagtgtccacatgcgatggacgtctgtcttcggaaaaaggtgtgcctcagggcggtcctctgtccccgcttctggctaacattgtcctgaacgaaatggattgggaactcgaacgtcgccagttacgtttcgcgcgctacgccgatgattgtcagatcctggtaggctcccaccaggcgggtcagggtgtcatggcatcattgacccgctttattgaaaaaaccttgcgccttaaagtcaatcgtgaaaaatcggccgttgccgatgttcacgaacgcacatttctgggctttgtcctcacgcgccgtgatcaacgcatccgtgttagtgggaaagtactcgaaaaattaaaagcaaccgtgcgcactgtaactcgtcgcacccgtggacatagctttcgcaagattctggaagagctgcgccgctcgctgttggggtggaaagcatatttcgacgcaagcgaagtcctgagtcccctgaaagaactggataagtggattcggcgtaagctgcgttgctatctgtggaagcaatggggtcgtgcgggctatcgccgcctgcgtgaattgggcgtaagccgtcaactggcgtggaacacagctaaaagtgcgcatggcccatggcggattagccattcgccggccctctaccacgccctgccgacttcctacttccgtagcttaggactcccggagttagcggcgcgg

SEQ ID NO: 164 - DNA, 1368 bp, synthetic construct
  source 1..1368: mol_type = other DNA
atgtcgctgaaacatgctatgcaccagatgctcggccaaccgggccgtgccaatgtgggggaaggcgaaccgcagctggatgtggtaagcgatgaagcatcattagcgggtcatacccaggaagggagtggccaggaagacttgctgcaacaaatcctgctgcgtgaaaacctggtgaaggcatggaagcatgttaaagccaataaaggtagcgcgggcatcgatggactgacgattgagcagactaccgaatatctcaaaacccactggtcaaaaattcgtgaagagttgctgtctggccaataccgccctcaagcggtgcgttgcgtcgaaattccgaaaccaggttccggtacccgtgaactgggtatcccgactgtggttgatcgtctcattcagcaggcgatgttacaggtgctgcagcccttaatcgacccgacattcagtaacttttcctatggctttcgcccggctcgctctgcacataacgcggttctgaaagccaaacgctacgtcgaggaaggttatcagatcgtcgtggatattgaccttgagaagttctttgaccgcattaaccacgatatcctgattgatcgcctgtcgaagaaaattccggataaaagtgtgctcggcctgattcgccgttaccttcaggcgggcacgatggtgaatggtgtagttatggaacgcgaagaaggcacgccacagggcggtccattaagcgcactgttagctaatgtcttgctggatgaagtcgacaaagccctggagcgccgcggtcataagtttgcacgttatgcggacgattgtaatgtttatgtacatagccaacgcgctggagaacgcgttcttcagtcattgcgctgcatctacgccaaacttcacctgaaagtaaacgaagctaaaactaccgtgggaacagtgttcgggcgtaagttcctgggctattgcttgcgtcgctggtcgggtgatacggtgaaaattgcggtggccaccaaagcattagagacattcaaacagcgcattcgtctgatcacctgtcgtgtaggcggtcgtagcatgattcaagttgccgagcgtctccgcgcgtatctgccggggtggaaaagctattttcgtttggcgcagacgcccactacctttaaagatcttgactcctggctgcggcaccgtctccgtgccatccaactgaaacactggcgtcgtggatctacgacctaccgggaattacggaaactgggggctacccatgagatggcgagtttgatggccgggggtgcaggccattggtggcggcattccaagtttaaccttaacatggtcctgaccgttgcgtactttaataacctgggcgtcccttggctgacg

SEQ ID NO: 165 - DNA, 1374 bp, synthetic construct
  source 1..1374: mol_type = other DNA
atgaaaaatggcgaggaaccgtccccggactctactcgtcgcctttcacgtccgggtcaagccgctgccgccccgtccgagaaaccatccccgagtctgtttccagaacgcatgatggaagtcatcgtggactctgcaaacatgcagcgtgcttgggatcaagtccgcggaaaccgtggggcgcccggacccgatggtgttacgctgacgcagtttcctgaatggtttcgcccgcagtgggccgtaattcgccagcagctgctcgatcgcacctacgagccgtcaccagtgcgtcgcaaaacaattgacaaaccggatggtggccagcgtcagttggggattccgaacgttctggatcgtctcattcagcaggcgattcagcaagtgctcaccccggtgtttgacccgggattttcggatagctcgcacgggtttcgtccaaatcgctcggcccatggcgcggctaaacaggtggaacgcacgattcgtcgcggtcgtcgcttcgtggtggacatggatctgtctaagttctttgatcgtgttcaacacgatgtgttaatgtcgcgcgttgctcgtaaagtgcgggatcggcgcttactgaaactgattggtcgctaccttcgtgcaggtgttatggtagaaggcgtcttgcagagcagccctgaaggtacccctcagggtggccccttatcaccattgctggcgaacatcctgctggacgacatggataaagagctggagcgtcgtggcttgccgtttgtccgttatgccgatgattttgtgattttcaccaaaacacggcgtgcggcggaacgcgttttcaacggtgtaaaccgctatcttaccaaggttctgcgtttagtggtcaatcttgagaaatcccggatccttccggcggacggggtagaatttctgggcttcgtctttcggggcgtcacaggtaccatccacgtgagcgaaaaaagcgttcaaaagtgcaaacgctggatccgtgaactgaccggccgctctcgcggcatcagtatgacccaacggttgggggaactgcgtcgctatttgcaaggctgggcaggctacttcgcactggcgaaacagatgcgtctgttcgaaaatcttgaccagtggatccgtcggcgtctgcgcatgtgcctgtggaaatgttggcgttttgttcggacgcgtgtacaaaacctcttagcactgggtgtacctcgccgccaggcgttccgtcatgctaaaagtcgtcagggcccgtggcatatggcgaagactattgccagcggagtcggtatgacgaatgcatggctgcatgatcaaggcctcgtgagcttaaagagtctgtgggttaaacgtgcacctctgcgccgtactgcc

SEQ ID NO: 166 - DNA, 1266 bp, synthetic construct
  source 1..1266: mol_type = other DNA
atgaaaaaatggtattcgctgatcgataaggtgtaccgcctggataaccttaaacgggcttatcgcgcggttcgtgcaaataaaggagcgccgggtgtggacggtgaaaccgtcgaagcgtttggtcagaacctcgaggagcgcttacatcagttacatcatgaactgaaaacgggtacgtacgaacctcaaccggtgctccgggtcgaaattccgaaagcagacggcagcaaactgccgctcggcattccaacagtgaaagaccgcgttgtgcagcaggccttattgaacattatgcagcctatttttgaaccggattttcacccgtcgtcctatggctatcgcccgggtcgttcatgtcatcaggctgtggccaaaagtgagcgtttcatgaacaagtatgggttagagtatgtagtagatatggacctttctaagtgcttcgaccgcctggaccatgaactcattctggaaggcgtaaaccgtaaggtgtctgatggatctgttttgcgcctgattaaaaaatttttaaccgccggtgtcatgaaaaatggcgcatgggaagaaactgatattggctcaccccagggcggggtgttcagcccactgatcgctaacatctacctggatcgctttgatcaagatatgaaacgtcgcggtattcgcatcgtacgttacgcagacgatattctcatctttgcacgtactcaccgtgaggcccgtaagtatcagaaactggcgacggaaattttggaaagcgagctgaaactggttgttaacaaggaaaaaacccacctgacatccgtcaaaaaaggcgtaacctatcttggtttcatcatcaaaagtaagttcgtcagtatccacccaaaaaaaattaaaagtttcaaagatcgtatccgccaactgaccccgcgtaatcatggaattaacgttgaagaaatggttaaacgcctgaacccggttctgcgcgggtgggccaattattttcgtgtggcgaattgcaagatgcttttcctgcagctgatggaatggattcgtcgtcgcctgcgtatgaaacaaatgaaagaatggaaaagctggaaaccactgcacaaagcgttacggcgccgcggttacaaaggcgagtttcggaagatttcagtgacccgttggtgtaattcggctagccctttggtcaatatggccttgcccaattcctggtttaatgaaatcgggctgattaaccttgcgagctacaacgtgggcatcttgcaccatttttgggag

SEQ ID NO: 167 - DNA, 1284 bp, synthetic construct
  source 1..1284: mol_type = other DNA
atgggcgacactatgaccaaacgcaagcatcacagtctctatggccagatcctgcaacgcttagataccgcattcgcgaaagtgaaagcgaatcgcggcgcggcggggattgatggagagtccattgccgagttcgagcaagatcttgaagctaatcttgcacaactgaaacgcgatcttaaagaaaaaacgtacgcgccacaacccgtccgtcgtgtgtatattccaaaagccagcggtgggcagcgtccgttaggaatcccaactgttcgtgatcgcgtggtacagcaggccctgcgtttagtgctggaaccggttttcgaaccgctgttttgcgacagttcttacggtttccgtccgggtcgctctgcccatcaggcgctggaccgtgtgagcggccacctgcgtgaaggttataagtgggtggtcgattgtgatttgaaatcgtatttcgatacaatccctcaggaagcattgatcgatcgtgtggcagaagaagtcgcggatggaacggtcctgaaactcatccggtcgtttctccaggccggggttatgagtgaaggccagcttcagcgcaccatcgctggcacgcctcaaggtggcgtaatcagcccactgctcgcaaatatctatctgcatggttttgaccagctgatggaagatcgcggcctgcgcctgacgcgttacgcggacgattttgttattttatgccgcacccaacgcgccgctgaacgggtaatggggaatgtccagtcatacttggaaggccagctcggtctgacggttaaccgcgaaaaatccaaagtcgttcacctttccgagggctttgttttcctgggctatgagtttggaacctggggtcgtcgtccggggcctaaagccattctgcggttcaagcaacgcattcgtgaactgacccgtcggaaccagactattcccgtagataagatggtgcgtgagcaactgaacccgtatctgcaaggctgggcaggttactttggctatggccaggtccgtcagcgttttctggactacgataagtggattcgtcggcgccttcgtatggtccagctgcgctcgtggcgccatatgaaaggtttgcatcgtgctatgcgtcagaaaggttggaaagggccgctgccggcggtttatgtgaacatgcgtcgttggcgctcttcagttcacagcttagtgaactacgctttgggcccggactggattcgcggtctgggtttggtgagcttagtggactttcatcgtccgaccatggtaacagtgacccgc

SEQ ID NO: 168 - DNA, 1170 bp, synthetic construct
  source 1..1170: mol_type = other DNA
atggggcaaatgctcgaggccatcgcagacccggcgaacctggccgcagcgtgggcaaaagtccgggccaacgccggtgccgctggtgtcgatggtcagtccattgcggcgttcgatgcggactcggaacatcagttagttcgtctgcgccggcgcttactgtctgcagagcgctatgtcccgccgcctgtcttacgtgttgaaatcccaaagccggatggacgtatgcgccccctgggcattccgaccgtggctgatcgcgtggtgcaacaagcaacgcgccaggtgattgaaccacactttgaagcggaatttctgccgtgctcgttcggctatcggcctgggcgctccgcacagcgtgcagctgtttggtgggtaaaagaagcgatccgccgcggtgatcgctgggtggctgaatttgatgtggaaggattctttgatcaccttagccatgcacgtctcctgcgccaggtcgccaaaaaagtagacgaccccgaggtgattgggctggtgcggcgttggttacgcgcgggcgtctttagcgccgaaggcctggttcccagcgtggcgggcaccccacagggtggtgttatttcaccgttgctggctaatatctaccttcatcgtttggacgtgaaagtgcgtgcggcgggtttccggctgatccgttacgccgatgatttcgttattctggctgaccggcggtggaaagtaaaagcggccgaccgtctggttcgcagtatcctgtccgatatgggactgtcagtatctgaagccaaaagtggtgtcgtccgtgtacgcgacggcttcgagttcctggggtttacaatccatggccgctttttgcgtccgcgtccacgtgcgttggctagttttaaagatcgcgttcgtagccgtacccgtcgtcaggcgcctgtgtcgatgagccagatgattgatcagcttaacccgttactgcgcggctggggcacgtactatgcgattggggacgtagtttcactctttgaggaccttgataagtggattcgtatgcgcctgcgtagcaaagcccgtaaacgcttcaaaagtaaaggcggtcctgatggccaaaagtggccgaataaagcatttgatgatttgggcctggtgcgcctcgaacaccttgcccgcactggtaagctgtctccggtt

SEQ ID NO: 169 - DNA, 1158 bp, synthetic construct
  source 1..1158: mol_type = other DNA
atgaaaaaacgcaagtggtactcactggtggacaaaatttggaaattcagcaacctcgaggcagccttttctaaggtgaaagagaaccgcggcgccgcaggtatcgatcgtgtttcgattggtcagttcgaacgccagaagcagcaaaatcttctggaaatccagcgtctgctgcgcagcaaacgttatgaggctattcctgttcgtcgtgttgaaattccaaaaagtgatggccgttaccgtcctctgggtattccgaccgtccgtgaccgtgtcgtgcaacaagctacttttgcggtgatgtcgccgatttttgaaacgaagttcctggactgtagctatggttttcgtaaaggccgcaatacccatcaggctattgcaaaaatggaacagtatcgtaacgaaggctgcgaatgggttgtggaagcagacatcgaatcctttttcgatactgttaaccatgaattattgatcgatcaggtcgctgaagagattagcgatgggagtgtcctgaaactgatccgtagttggctgacggcgggcgcgtttaaaggcaccgaagtgattgagacaagcgtagggacgccgcaaggtggagtaatctcaccactgttagccaatatctatctgcatccgtttgatgtccagatgacagcattgggttttaaacttgttcgctacgcggatgactttgtgattatgtgccgctctgaagatgaagcggaacgtgcgatggaagccgccacccgtattctctcgggcatcaaacttcgggtgaaagcggcgaaaacgcgcatcgttcagttgagcaaggatgacggcatcgaattcctcggttttaccatcttcaaagagcacaaagtaccccgcactcgcgcagtagaaaatttcaaaagtcggattcgcctgattacccgtcgccaacgtccggctacccttcaggaaattattaaagagttaaacccggtggtgcgcgggtggggaaactattttaaaatcgccaacgtcaattggctctacaaaggcctggattcctggatgcggatgcgtctgcggtcctttttagaaaaaaagaagtcctacgaggcgaacaaacgcctggagaataaacacttctcggaagccggtttgaccacgctgtcatctctgattggatat

SEQ ID NO: 170 - DNA, 1380 bp, synthetic construct
  source 1..1380: mol_type = other DNA
atggcatcccccgccaccgaatgcccggcgggccattcagcggtggcgacaaaaagtagcgcgggtcaccgtgttggtttttttgctgcacggcgcgctgctaagagtcagggccgccgccagggtcaggatgggcagcaacgcagtcccaaaccgtcatctgggaatgcccgcgcggaaggcccgcgccgtgtcaaacggaaagtgagctctctgatcgaccaggtgtaccggtgggaaaatctttatcgggcatggcgccgtatccgtcgcaacaaaggtgtgcacggcctggaccgcgttactatccgtaattttgaggcggattgggaaaaacaccttcgggagattcaacgtatgttaatggaacagcgttatgtcccaacccctgtccgccgcgtgtacattccgaaacccgccgatccgaccaaacgtcgtccgttgggtattccgatcgtggcggaccggattgtacaacaggcaatctttcaggttgtggatccactgtttgactcaactatgtctgatcggtcgttcggctatcgtaaagggcgtaaagcccacgatgccgtcgccgctctcatttccgatgcgaagcaaggctaccgctttgtcttggatgccgatattgccagcttcttcgatgaaattgaccatgatgtggtcatgagctgcgtgcgcgctcgtattgccgacggacgcgttctggacctgtttgaggcgtttttgaaagcaggtgtgtccgaggatggcgaagtttcagtaccggataaaggagtcccacaaggtggagtaatcagcccgtggctgtcgaatctggttctggatcatctggacaaggcaatcgaaaaggaaggctggcgccatgcgcgttatgccgacgatttcgtggttctgtgccgtagccgcgaagaggcacagcgtgcgctgaccgtagttaaagaagtcttagaaacgcttaaacttagcctgcatgaaacgaagacccgcctcacagattgtgagcagggcttcgaatttctggggttccattttcgccactaccgtctgggtattcgtgaatcgtctatcgaacgtttcaaagatcgtgtacgcgcgttaacccggcgctggcaaggtcgtaacgtggacgcggtgttggcagatcttaacccggtcttacgtggctgggcgcgttatttcggcgtggccgaggttagtctgacgtttcgctacctggatagttggattcgcatgcgcctgcgtggttttaagtacaaacgtcgttgttatcatgacaactggcgcttgccatcgaaacgtctgaaacgttggggcctgctcagcctgcagcagtgtcgccctcagttacgtctctcctatgctcgtgcagttgggcct

SEQ ID NO: 171 - DNA, 1353 bp, synthetic construct
  source 1..1353: mol_type = other DNA
atgcaggaatctggtagtgctaaaactatgaccaatgatgaaacgactcgcccaaccgccgttgccggtctggatcaacccaaacaggcgggtaatatccgtgaccggtggggctggattgagcatagtgtgtggacggaacgtatgctgacccgcctcgaggcttctgagccgactacggtctggtatggcctgtgggataaagtacatagcgaacgtaacttggaagcggcgttttgggcagtttggcgcaaccgtggcgcaccgggcgtcgatgggcagaccgtccgtcagtttgaagcacaagaacaagctcagctggcgaaacttcgtgaagaattgcgtagcaaacgttaccatcgtcaaccagcccgtcggacgtggatcgcgaagcctggcacgctggagaagcgcccgctcggcattccggcagtgcgggaccgtactgtggaagcagctctgaaacaggtgttagaaccaatcttcgaacaggacttcgcggagcattcctatggctttcgcccgggacgtggttgtcgtgaagccgttaaacgtgtggaagcgctgttaggccaaggtcgggtgtggtgtgtagaccttgacttcaaaagttactttgatacaatccctcacgagcgcctgctgggcctggtacaacagcgtgttgtggatggttccgtgctggcactgttagctcaggggcttaaagccggagtactggaaaccctgaaaggctggcaacccacggaagttgggaccccgcagggtgcggtgatcagcccgctcttagcgaatctgtacctgaacccattggaccacgccatggcggagcgtggttgggaaatggtccgctatgccgatgatcttgttgtactctgccagtcccgcgaagaagccgaacaggcattggcatatcttcgccagtggagcggtgaggcgggtctgtcggttcaccctaccaaaacccgtattgtcaatgcccactcagaaggtttcgattttctcgggtggcatttccgcggcgggaagaaatggccgcgtaaaaagagcttgcagaaactgcgcgataaacttcggccgctgacccggcgtacaaacggtcgttctttagaagaaattattacaaagaccaaccgcattctgcgcggttggcacggctattttcgtgagtcgcatcctacgggcctgagcgggccggacggatgggtgcgtcgccgtttacgcgcgatgctgcgcaaacgtgaaaaacgcccgggctacggtctgagtgaggctgattcacgccgctggcccaatcgctggtttggagtccagggcttgttttcgctggagcatggatcatgcgcctatggc

SEQ ID NO: 172 - DNA, 1254 bp, synthetic construct
  source 1..1254: mol_type = other DNA
atgaaggcagaaggtacaggccagaaggtacactctctgatcgataaagtctaccaccgtatcaaccttgatatggcatgggaatctgtacgcgcgaatggcgggagtgggggaattgataagattgccattcccgcgtttcaagctgtggccgaggtagagttggaacgcttacacgaagaattaaaacagggtacttatcggccgatgccggttcggcggatcctgattccgaaaaaaggcaaacccggggaaaaacgccctctgggcattccgacgattcgtgatcgtgtgtgccaacaagcccttaaaaaccgcctcgaaccgattttcgagcctctcttttcggaatgcagcttcggctaccgcccgggtcgttcaactcatcaggccatgcgtaaaatgtatcgtgaaatcctggatggctatgaatggattgtggatgctgatctccgcgacttctttggtaccgttcatcatgaacctctgattgaccgcattgcagagcaagttagcgatggtcgtattctgaaactggtccgtcagatgctggaagctggttacatggaagacggtaaaaaatatgcgacgccgagcggcaccccacaaggcagcgttgtgagcccactgttttctaacatctatctgaaccgttttgaccatgagatgacaagtaaaggttaccgcttgacgcgcttcgcggacgattgggttgtgctttgtaaaacccgtgccgaggcagcgcgtgcgatccgggacgcacgtacaatcttagaatccttgggtctgacgttacatccagagaaaacgaaaattacccacatcaagtggggctttgagtttctggggtataaacttaaacgcggcaaaggtctgtccctgccccaggaaaaggttaagaagcagccaaaaaccaacatctatgcgttccctaaagcgaaaagtgtccagtcgtttatggataccattcgtacccgtacccaccgccgtattccgttaactgtctttcagcttattgactccattaatccggtgatccgcggatggggcaattatttccgtaaagctcatgtccgcaaactgttcaaccgtttgcagcgttggatcgtgcggcgcatctggtcgcatcgctataaacgttggcgcaatgccggatggaagaaactgccggaatcaatcttgtacagcaaatacaatctggtgaatctcctgtcactgattccggatctcaacctgcgtaccgccccgaaaggc

SEQ ID NO: 173 - DNA, 1293 bp, synthetic construct
  source 1..1293: mol_type = other DNA
atggaagtgactcgtcgggatcgtgtgaaagctggtttactggagaacatcctttcgcgcgataatatgttagctgcgttgaaacgcgttaaggcaaataagggttcgcatggggtggatgggatgaaagtagacgaactgccggcgtatcttaaagccgcttggcagaccattcgtcagagtctgttagatggtacctatgtacctcagccagtgcgccgtgtcgagatgccaaaacccgatggtggcgtccgtttacttgggatcccgacggtgctggatcgtttaatccagcaagccatcgcccaaattttgtcggatatttttgaacccggttttagctgccattcatatggttttcgtccgggcaaaggagcgcatgatgccattcgcgcggcgcgtgattatatccgtgcaggctacgactacgttgtggatattgacctcgagaagttctttgatcgcgttaaccacgacaaactgatggcgcgcgtagcgcgtaaagtagatgataaacgcgttctgaaactgatccgtcgttatctgaccagcggcgtgctggtcaatggagtgcgcgttgcctcagaagaaggcaccccgcagggcggccctttgtccccgctgttggcaaacattctgctggatgacctggataaagaactcgaacggcgtggtctgaaattttgtcgctatgcagacgactgtaacatctatgttaagagtaaacgggcgggcgagcgtgttatggcatcgattggtcgcttcatccgtgaacggctgtcactgaaaattaacgagaacaagagtgctgtagatcggccggcggctcgcaagtttctgggcttctctttttaccgtaagaaagacgacgtcggaatccgcatccacccgaaaagcgtgaaacgcttcaaggaaaaaattcgttccattacaaaccgtaattggagtatgagcatggacgaacgttttcgccggctgcacagcctgtgcgcgggctggatccgctacttcggcctcgcggatgcaaaaacacatatgcgtgaactggacgaatgggtccgtcgtcggattcgcgcctgcttctggaaacaatggaaacgcattaaaacgcgccatgataatctcgttaaactgggtgtggacagcatgaaagcctgggaatgggccaatacgcgcaaaaaatactggcgcattgccgggtcttgggtgttggcaaccactttaacgaatcaggtcctcgaagatatgggttttcgcaacctttccaaactttactccgagatgacctattct

SEQ ID NO: 174 - DNA, 837 bp, synthetic construct
  source 1..837: mol_type = other DNA
atggctagcgcatggagtcatcctcaattcgaaaaatccggaatgccctacaattacgacttatgttttaagactccgcaaaaccggtggatattcgtaccaacatcagagtgccgcgataatggatacgaatacgttaaacttatacgacgaaaatggaccctgccgaacttttactatcaccttaaggctggcggacacatagctgcacttaagctgcacgagggtaataactactttgccaagattgacattaagtcattctttccctcgatatctaaggcgaaggtcatccgggcattaaaggatataggcatcaattacaagctggcggagttaatcgcctcttggtcaaccgttaagtcaaaggagaacagtactaaatatatagtgccatacggatttgtccaatcgcagataattgcttcattatgccttgataagagcgcgataggttccttcataaagaacaagctgccgaccgacgtgaaggtttcagtctatgtcgacgatatcattctgtcctcgaacaaccctagtgcgctccaagacatctacaatcaaattatcgctacgttcgacaaaacaggtttcaccgtaaatacagagaagtcacacgaagttttagaccaaacgacgacttttaacatcgttatgaatgctgaagacatgcagataaccgaggaccgtttcacagactttgaatctgccatcactccccttaacattaaacgctcagaggccatcattaactacgtgagttcagtttgctctatccaatctgagacgctgaaggagcaactcaaaagcatgatagacaactcgaagtgtgcatga

SEQ ID NO: 175 - DNA, 933 bp, synthetic construct
  source 1..933: mol_type = other DNA
atggctagcgcatggagtcatcctcaattcgaaaaatccggaatgcaatggcttcggtattacgaattaagccccgggtcacagaaatacatctacatacctactgatgaaagtcgattaatcggaagtgaaattattaatgtattgaagtaccggtggaagaagccggagtacttctatcacttccggcaaggtgggcacctgagtgctatcaaggtgcatttctacgacgaggagccgtgtcaattctctgttttcgatctttcaggctattatcgccagataacccggtcaaagcttgtccgagttttgaagaaatatgttggctacgagcaggcactggattgggctcaaaagagcaccgtgctccaaaatggggatctgggccggagtatacctttagggtttgttcaatcaggtttcttggcaagtttagtcttagataacagctgtttaggcaagaccctgcgagaaattaataagactcctaatatccgtatttccgtcttcgtggacgatatcgttatctcctcgcaagaccatgagctgttaagtttctactcacagaagataaaagaggcgagcaagaagtcaaacctgacgctgcaacaccgtaagacgttttgtaacatagattcgatcaacatctttaatctgtcatacaaatcaggtagtgagattgatttctgtgccgatcgggttaacaacttcaaggaaattctcgtaaagaattgcgatcgcaaattcgtcgtatttggggtcatcatgtacatgcttaaagtaaacgcaaagagaactttatcgattctggactctatagtgcaagagaaggggatttctaaaactggtatcctgggcaagttttactacgaacacaagataaaggagaatcaaaatataatcgagacgttacgcaaggtgtgttttcaatga

SEQ ID NO: 176 - DNA, 813 bp, synthetic construct
  source 1..813: mol_type = other DNA
atggctagcgcatggagtcatcctcaattcgaaaaatccggaatgagcaattacacccctaagtggattcatcgtatcacgttagaaaacgggaaatggatctttgtcccatctcaatccagccgactgtctggtaaagctatagttaagaaggtaaaacttgagtgggcgccccctaagtacttctaccacttaagacggggtggccacatagcggcgttaaatgcgcacctcgagaacaagtactttagtcgcctggacatcaagaacttcttcggaagtattactgcaagtcgaatcacacgtacccttaaaccttacttcggttataacttatcccgggacatagcaaagcaatcgacagttcgtatcccgggcttgttagagagaaaactcatgctgccgttcggcttcatacaaagcgcgatcttggctagtatttgtttggacaagtcgtcattgggcatatttctcaaacgcatcaaacgggacaagtcgctgtccctgtcagtgtacatggacgatattctgatctcttcgaatgatcaacaacgcttgatagaagtaacggcagaattgaagtcctatttcagcaagagccactgggtgagcaatactggcaaagaggttatagccgccgatagtatgacagcgtttaacatcgatatgttgcaatatgagatgcgtgttagcgaagagaagatgaagcaattcgccttcaacttctctgaaacagagaacatcaacaagaagaagggcatctactcatacgtgaagactgtgaatgacggtcaattgatagacttagtttga

SEQ ID NO: 177 - DNA, 798 bp, synthetic construct
  source 1..798: mol_type = other DNA
atggctagcgcatggagtcatcctcaattcgaaaaatccggaatgacccaaaagtggacacaccgctaccaacttaagcctggccgatgggtattcgcacccacggatgaggcaaagaaatgtggcgcccatatcaagcggagcgtcgcgagtagatggaaggctccgaacttttattatcacttgcgaaacggtggccacgtagctgcggttcgaagtcacgagttatcacgtttcttcttccgagccgaccttgatgacttcttcggacgtgtcaaccggagtcgcgtaacccggtgcctgaagccatggttttcctatgcggaagcgcgggagatggccagtgagtctgtagtcaagcgccccggggagacagccttcgtacttccctacggctttgtacagtcccccatcctggcgtcgcttgcgctggacaaatctaaattagggtcgttgcttcgatctttagacggtggcagagacttcactgtttcggtatacgtggacgacataattatctcaggcgacgacgaagctcagttgaaggaagtggcatcacgcctcgagcgggtagcgagcgaggctctgttccccctcagctctggtaagacccagggacctgcctctggtgttaccgtctttaacattgaactcagtcaccgtatgttacggataacagacgatcggttggcgtcactccgtctggactaccaagcaactgcgtctgaacactgtaaagccggaatcgtgtcgtatgtgtactcagtgaaccctgatcaagtggcccaggtcacctga

SEQ ID NO: 178 - DNA, 738 bp, synthetic construct
  source 1..738: mol_type = other DNA
atggctagcgcatggagtcatcctcaattcgaaaaatccggaatgcaatggagttcatattatgagttaacacccggcagtaagaaatacatttacattcccactgagcaatcacgtgagctgggtaagctgataatcgaaaccattagaaagcgatggacgccgccggcatacttcttccatctgcggaagggcggtcacttggcagcgatcaagcaccatatagacaaatcttgcaaaccacgtaagtttagtgtattcgacatatccgggtacttcggccaagtcaccgaaaataagttacggcgggtgctgaagaacttcgtatcattcaaggaagctagtcagtgggcttatgattctacagtcagaaagccttcggaagaccgacgtaccttgccttacggcttcttgcaaagcggagatctggcgagtttagttctggaccgaagttacttaggctgcgagtttcggaagatccaccaaaacccgaacataaagctttctgtctttgtggacgatatcattgcaagctcaagcgacccaattcttttagaagaggcctcgaacagcataattaatgcagcaaagttgtcaaatttcaagttcaatcaggacaagattcgttgcaatgtggatgaaattgagattttcaacatccactgctcccaagatttcggtttatcattcagccaagagaaattaaagaagaactcgaccaactcgaagaaactgtga

SEQ ID NO: 179 - DNA, 924 bp, synthetic construct
  source 1..924: mol_type = other DNA
atggctagcgcatggagtcatcctcaattcgaaaaatccggaatgctcattgacaagttttctaaggaaatcgggctcccgcggcctagtgtccaaaagatagccgcaagcgctaactacttatacaagcattacaccataccaaagcgttcaggtggagaacgcgacatctaccatcctacaccgagactgaagttagttcaacgctggattacccgccacgttatccgcgatcttcccgtgagtgacgcggcaatggcataccggaagggcaagagtatcactgataacgcgagattacatgctggaaagcgcttcttgctcaagatggacttcacggatttcttcccgtctattaaggcgcgcgacttacaacctattctgacgagccgtggttatgacccagaggatgttaacttcatactcacaatttgttttaagtcaggctcccttactatcggtgctccctcttcacccgctgtcagtaacattgttatgttcgccttggaccaggagtttaagggtatcgcggaccggcgcaagctgacctactcacgctacgccgacgacttgacatttgcgggaaacgtccgaggaaacttaatcgaagcgaagaaagacgttgaacggttgataggaacgtgggcgtctcctaacttaacacttaatcaacgtaagaccgttttggtgtcgtcggctcatagacaaaaggtaacagggattaccttaaccacggacggcgagatttccatcggtagagagaagaagagagaattgcgtgcaattgtgcaccgtagtacctaccagaaactggaaccagaggtcgaagcgtacgtacaaggttggctggcttacgctaactccattgagccgaagttcgtagactcgttgagaaagaagttcgatacataccttgacttttga

SEQ ID NO: 180 - DNA, 798 bp, synthetic construct
  source 1..798: mol_type = other DNA
atggctagcgcatggagtcatcctcaattcgaaaaatccggaatgcccatcaatttcaagtttgcatacgaatgtaaaggcaagagaatcttcgtgccaaatgacgagtgcgttagacgtggtgaggcactgattaaatattgttctcaggcggttgactttccaagctacttctaccactacagagctggtgggcacgtagccgcattgcaccgtcatttggagcaccgtttcttcttccgaatcgacatcgagaacttcttttactccattagccgcaaccgagtgagcgcagtactgcatcatataggtttccgtaaggcgcgcccatacgcggagtggtcttgcgtgaagaatccttttggggcaccggcttactctttaccgatcggcttcgtgcaatctccaatgcttgcatcattagccattctgcgcagcccggtggcagccgccatagagcgcgccgccgcagcaggtgccttcgtgagtgtatattttgacgacttcatcggctccgctgttgaccgggaacctttggagaaagcgtttcaggatatactgcactcttgtcaagaagctaatctcatatcaaatcagctcaaacttgcaaagccgtctgagcacatcttggcttttaactgcgatctctctcacggtatcgccgaggtcgcagaggctcgcgtggcaaagttcttcaaggcacctcgtagtcaatgggcggaagcggcgttccgtgagtactgcaaccgcgtggcgagaaacaatcataagtccgaaggcagacggttcctgcgttga

SEQ ID NO: 181 - DNA, 792 bp, synthetic construct
  source 1..792: mol_type = other DNA
atgccctacaattacgacttatgttttaagactccgcaaaaccggtggatattcgtaccaacatcagagtgccgcgataatggatacgaatacgttaaacttatacgacgaaaatggaccctgccgaacttttactatcaccttaaggctggcggacacatagctgcacttaagctgcacgagggtaataactactttgccaagattgacattaagtcattctttccctcgatatctaaggcgaaggtcatccgggcattaaaggatataggcatcaattacaagctggcggagttaatcgcctcttggtcaaccgttaagtcaaaggagaacagtactaaatatatagtgccatacggatttgtccaatcgcagataattgcttcattatgccttgataagagcgcgataggttccttcataaagaacaagctgccgaccgacgtgaaggtttcagtctatgtcgacgatatcattctgtcctcgaacaaccctagtgcgctccaagacatctacaatcaaattatcgctacgttcgacaaaacaggtttcaccgtaaatacagagaagtcacacgaagttttagaccaaacgacgacttttaacatcgttatgaatgctgaagacatgcagataaccgaggaccgtttcacagactttgaatctgccatcactccccttaacattaaacgctcagaggccatcattaactacgtgagttcagtttgctctatccaatctgagacgctgaaggagcaactcaaaagcatgatagacaactcgaagtgtgca

SEQ ID NO: 182 - DNA, 888 bp, synthetic construct
  source 1..888: mol_type = other DNA
atgcaatggcttcggtattacgaattaagccccgggtcacagaaatacatctacatacctactgatgaaagtcgattaatcggaagtgaaattattaatgtattgaagtaccggtggaagaagccggagtacttctatcacttccggcaaggtgggcacctgagtgctatcaaggtgcatttctacgacgaggagccgtgtcaattctctgttttcgatctttcaggctattatcgccagataacccggtcaaagcttgtccgagttttgaagaaatatgttggctacgagcaggcactggattgggctcaaaagagcaccgtgctccaaaatggggatctgggccggagtatacctttagggtttgttcaatcaggtttcttggcaagtttagtcttagataacagctgtttaggcaagaccctgcgagaaattaataagactcctaatatccgtatttccgtcttcgtggacgatatcgttatctcctcgcaagaccatgagctgttaagtttctactcacagaagataaaagaggcgagcaagaagtcaaacctgacgctgcaacaccgtaagacgttttgtaacatagattcgatcaacatctttaatctgtcatacaaatcaggtagtgagattgatttctgtgccgatcgggttaacaacttcaaggaaattctcgtaaagaattgcgatcgcaaattcgtcgtatttggggtcatcatgtacatgcttaaagtaaacgcaaagagaactttatcgattctggactctatagtgcaagagaaggggatttctaaaactggtatcctgggcaagttttactacgaacacaagataaaggagaatcaaaatataatcgagacgttacgcaaggtgtgttttcaa

SEQ ID NO: 183 - DNA, 768 bp, synthetic construct
  source 1..768: mol_type = other DNA
atgagcaattacacccctaagtggattcatcgtatcacgttagaaaacgggaaatggatctttgtcccatctcaatccagccgactgtctggtaaagctatagttaagaaggtaaaacttgagtgggcgccccctaagtacttctaccacttaagacggggtggccacatagcggcgttaaatgcgcacctcgagaacaagtactttagtcgcctggacatcaagaacttcttcggaagtattactgcaagtcgaatcacacgtacccttaaaccttacttcggttataacttatcccgggacatagcaaagcaatcgacagttcgtatcccgggcttgttagagagaaaactcatgctgccgttcggcttcatacaaagcgcgatcttggctagtatttgtttggacaagtcgtcattgggcatatttctcaaacgcatcaaacgggacaagtcgctgtccctgtcagtgtacatggacgatattctgatctcttcgaatgatcaacaacgcttgatagaagtaacggcagaattgaagtcctatttcagcaagagccactgggtgagcaatactggcaaagaggttatagccgccgatagtatgacagcgtttaacatcgatatgttgcaatatgagatgcgtgttagcgaagagaagatgaagcaattcgccttcaacttctctgaaacagagaacatcaacaagaagaagggcatctactcatacgtgaagactgtgaatgacggtcaattgatagacttagtt

SEQ ID NO: 184 - DNA, 753 bp, synthetic construct
  source 1..753: mol_type = other DNA
atgacccaaaagtggacacaccgctaccaacttaagcctggccgatgggtattcgcacccacggatgaggcaaagaaatgtggcgcccatatcaagcggagcgtcgcgagtagatggaaggctccgaacttttattatcacttgcgaaacggtggccacgtagctgcggttcgaagtcacgagttatcacgtttcttcttccgagccgaccttgatgacttcttcggacgtgtcaaccggagtcgcgtaacccggtgcctgaagccatggttttcctatgcggaagcgcgggagatggccagtgagtctgtagtcaagcgccccggggagacagccttcgtacttccctacggctttgtacagtcccccatcctggcgtcgcttgcgctggacaaatctaaattagggtcgttgcttcgatctttagacggtggcagagacttcactgtttcggtatacgtggacgacataattatctcaggcgacgacgaagctcagttgaaggaagtggcatcacgcctcgagcgggtagcgagcgaggctctgttccccctcagctctggtaagacccagggacctgcctctggtgttaccgtctttaacattgaactcagtcaccgtatgttacggataacagacgatcggttggcgtcactccgtctggactaccaagcaactgcgtctgaacactgtaaagccggaatcgtgtcgtatgtgtactcagtgaaccctgatcaagtggcccaggtcacc

SEQ ID NO: 185 - DNA, 693 bp, synthetic construct
  source 1..693: mol_type = other DNA
atgcaatggagttcatattatgagttaacacccggcagtaagaaatacatttacattcccactgagcaatcacgtgagctgggtaagctgataatcgaaaccattagaaagcgatggacgccgccggcatacttcttccatctgcggaagggcggtcacttggcagcgatcaagcaccatatagacaaatcttgcaaaccacgtaagtttagtgtattcgacatatccgggtacttcggccaagtcaccgaaaataagttacggcgggtgctgaagaacttcgtatcattcaaggaagctagtcagtgggcttatgattctacagtcagaaagccttcggaagaccgacgtaccttgccttacggcttcttgcaaagcggagatctggcgagtttagttctggaccgaagttacttaggctgcgagtttcggaagatccaccaaaacccgaacataaagctttctgtctttgtggacgatatcattgcaagctcaagcgacccaattcttttagaagaggcctcgaacagcataattaatgcagcaaagttgtcaaatttcaagttcaatcaggacaagattcgttgcaatgtggatgaaattgagattttcaacatccactgctcccaagatttcggtttatcattcagccaagagaaattaaagaagaactcgaccaactcgaagaaactg

SEQ ID NO: 186 - DNA, 879 bp, synthetic construct
  source 1..879: mol_type = other DNA
atgctcattgacaagttttctaaggaaatcgggctcccgcggcctagtgtccaaaagatagccgcaagcgctaactacttatacaagcattacaccataccaaagcgttcaggtggagaacgcgacatctaccatcctacaccgagactgaagttagttcaacgctggattacccgccacgttatccgcgatcttcccgtgagtgacgcggcaatggcataccggaagggcaagagtatcactgataacgcgagattacatgctggaaagcgcttcttgctcaagatggacttcacggatttcttcccgtctattaaggcgcgcgacttacaacctattctgacgagccgtggttatgacccagaggatgttaacttcatactcacaatttgttttaagtcaggctcccttactatcggtgctccctcttcacccgctgtcagtaacattgttatgttcgccttggaccaggagtttaagggtatcgcggaccggcgcaagctgacctactcacgctacgccgacgacttgacatttgcgggaaacgtccgaggaaacttaatcgaagcgaagaaagacgttgaacggttgataggaacgtgggcgtctcctaacttaacacttaatcaacgtaagaccgttttggtgtcgtcggctcatagacaaaaggtaacagggattaccttaaccacggacggcgagatttccatcggtagagagaagaagagagaattgcgtgcaattgtgcaccgtagtacctaccagaaactggaaccagaggtcgaagcgtacgtacaaggttggctggcttacgctaactccattgagccgaagttcgtagactcgttgagaaagaagttcgatacataccttgacttt

SEQ ID NO: 187 - DNA, 753 bp, synthetic construct
  source 1..753: mol_type = other DNA
atgcccatcaatttcaagtttgcatacgaatgtaaaggcaagagaatcttcgtgccaaatgacgagtgcgttagacgtggtgaggcactgattaaatattgttctcaggcggttgactttccaagctacttctaccactacagagctggtgggcacgtagccgcattgcaccgtcatttggagcaccgtttcttcttccgaatcgacatcgagaacttcttttactccattagccgcaaccgagtgagcgcagtactgcatcatataggtttccgtaaggcgcgcccatacgcggagtggtcttgcgtgaagaatccttttggggcaccggcttactctttaccgatcggcttcgtgcaatctccaatgcttgcatcattagccattctgcgcagcccggtggcagccgccatagagcgcgccgccgcagcaggtgccttcgtgagtgtatattttgacgacttcatcggctccgctgttgaccgggaacctttggagaaagcgtttcaggatatactgcactcttgtcaagaagctaatctcatatcaaatcagctcaaacttgcaaagccgtctgagcacatcttggcttttaactgcgatctctctcacggtatcgccgaggtcgcagaggctcgcgtggcaaagttcttcaaggcacctcgtagtcaatgggcggaagcggcgttccgtgagtactgcaaccgcgtggcgagaaacaatcataagtccgaaggcagacggttcctgcgt

SEQ ID NO: 188 - DNA, 1719 bp, synthetic construct
  source 1..1719: mol_type = other DNA
atggctagcgcatggagtcatcctcaattcgaaaaatccggaatgaacattgaggaagtacagcgccgtctttgggagcagagtcgtgctcatcggcagcaacgtgaaagcggctcccctctgttcccggcaaacccatatgacgatcgcatccgcaagcttatggatctgatgcataatcctacatggatcgctgcagcatgtgatcgcgtactgaaacgtagccgtggcaaagcggtgggtgtggatggtgttcgcgttcgtgactttgaacgttcctgcgagcaccgtctcgaggaactgcgccttgagctgaaacgtggcacgtaccaaccgctcccgctgcgtcgtgttgaaatcccgaaagctaatggcaaaatgcggcgcctggggattgcgtgtctgcgtgataaaattgtgcaggaagcgattcgtatggcgctggaaccgatctttgaggccgaatttcatcgtaattcgtacggtttccgccccaaccgttcggctcatcatgccattgcgcaatgccgcaacgcggcactggctggctatgcgtggacgatcgaaggagatgtaaaagcgtgttttgacgaaattgcgcacaaagccatcttgcgctgtgtccgtgagaaagtgatggataacaagttcctgaacctgattgaccgtttgctgaaggccggagttgaaattgatggcgttgtgcatcctacgactaaaggtgtcccgcagggtggcgtcgcgtcaccactgctggctaacgctgtgctgaacaagttagactggttcttgcagtctaaaggtttttatgatgccgccaaacgtcgtcgttcatctcatagtttaccaaacattcgcttctgccgctatgcggatgattggtgtgtattcgtcacccgctgcgatcgtcagtatgcggagcgcttgaaggacgaaatccgcgactttctgcgggaaacctgcggactggaactgagtgccgaaaaaacccgcattacccacgtacgtgacgggtacgatttcctgggcttcaacatttcggtaggggtgggccaaagcggcaaaatggttcccaaggttaaagtcggtcgtaaagcaattgcaaatatccaacgtcgtttaggggaatccttacgctatcgtcccatgcaagaatccatttcagtccggctggtccgtacgagtgcagttatccgcggctggagcaattattttaaagcggcacataactttagccgggtcgcacacggcctcgatcataaagccttctggattaccgctaaggcgatttgccgtaaagaagatatctctactgcgaagtgttttcgtcgctatcggctgggcaataaaatcggtgtgcacgaagcgtgcaccctcgcccgctttcaggagacagcgtcaagctattactacgccgccccgaaaccgtaccagccgggttgtaaccgctaccttgacgaccacgaatgggaagccgctttagtgctgtctgaacatgcgcgcccaggttcgggagatttgaaatggaaagcattggtgcgggatggttttcattgccgcgggtgtgccgttgtggtgtccgcacgcactagccatgcagaccacatccgcccggtgaatagctttgcgaatcttgagttagccaatgatcttgataatattcagaccctgtgccgttggtgtcacaaacagaaaagtgcccgtgaactctgcgcgtga

SEQ ID NO: 189 - DNA, 1737 bp, synthetic construct
  source 1..1737: mol_type = other DNA
atggctagcgcatggagtcatcctcaattcgaaaaatccggaatgtatccgaccaaaatggctgaaaaacaggcaaaactggcagagacagcgttatcgaatccggaacatcgtttccataatctgtatgatcttatgcattggcggtattggattgaagaagcggccgcaaaagtactggcccgccctggctcgagcacggcaggcgttgatggtaaaacacgcgttgatttcgaaaaaaattacgcgaccgaaatctcccgtattgtgaccgaactcaaagataagacctatgcaccgcaacccgtccgccgcatgcatatcccgaaaggtaacggcaagacccgccctttgggaatccccattctgcgggatcggattgttcaagaggctctccgcgcgattctggatccgatctacgaaagcgactttcaacatcactcatacgggtttcgtaaaggtcgttgtactatggatgccgttgcggttctgatgccattattcaatacgcaggtcaagcactattgggttattgagggagacatcaaaagttatttcgataatgtgcaccaccgcaagcttatgaaacttctccgtcagcgtatcgctgacaaagcgctgctcgacctgatctggaaattcttaaaagcaggtgtgatggaaggtcgtttatttgcctgtacagaaactggggttccacagggcggcgtgatcagcccgttgttggctaacgtctatctgaatgaatttgataagtgggcggaacgccagtggcacaacctgaccccgtacgaccgtcagcgtcgtcgccaagcgggcttgggcaactacactatggtacgttatgccgacgattttgtgattgtgtctaacggtactcgcgcggaagtggagcgcacgaaagaggcagtgcgccgttttttggcggaagagctgcacctggaactcagcgcggagaagacactgatcactcatgtgaacgacggttttgactttttagggtttcatattcagcgctgtaaacccgaaggccgctgggtagtccacctgcgtccgaccgaaaaaaacaagcagcgcattaaacaccgcatgaaagaactgacgagtcgcaactggacctggatggatgagtacactcgtctgacggccttgaaccgcattgttaaaggctggtgcatgtattaccgttacaccagcctgcactcagatcttgaagaaattactcgttacatttggttccgttatctgcagtggctcctgcgtaaacacaaaggctcccgtaaacatcagctgatccaggaaaaaacggccgtgattcataatcgcacccgttggacggccaccgtagcccaagacggtcaggcgattaccgcccatcaatggctgccgacgccaaaagagttaaaacgcgaacgttatcgtctgaaaggccgtggcgggttcgcgcacccttatcttgagccagctctggacaccaccgataacccggaatgggaagggggtccggccgaagtcctgttcaccgaggtcatcggtgcacgcagtcgtcgtggagaaccgttagagatggctgaactgaaattacgccgtaagctgcgggatcgctttacatgtcagcattgcggctcccgggagcatcttcaagtgcatcatgtcggtcctgtaacgtctacgtcgatcgatgatctgattaccctgtgcttgaagtgccatcagcagcaacatcggcagaattga

SEQ ID NO: 190 - DNA, 1572 bp, synthetic construct
  source 1..1572: mol_type = other DNA
atggctagcgcatggagtcatcctcaattcgaaaaatccggaatgattatttctgaaatgcagcacaaacttgccacctgggcggaaagcgatcctaaccgtcgcttcgatcgtctgctgcgtctgatcgctaataaagagtggctggccgaggcggctcgcatggtactggcatccagcggtgcacggacgccgggcatcgatggcatggacaaacagcgtctgcaagtgaaactggatcagcatcttgacgatcttcgtgcctcgttattggaagaatcataccgtccgcagccggtcaaacgtatctacatccctaagagtaatggtaaacttcgcccattgggaatcccaaccctgactgatcgtatcgtccagcgcgctatgctgatggccatggaaccgatctgggaatcggactttcatcgcctcagctatggttttcgtcccgaacgttcagtgcatcacgcggttcgtacagtccgcattcaattacaggatggggcagataccacccgcggtcgttggattattgaaggtgatctggcctcttatttcgatacggtccatcaccgcttactgttaaaatgcgtgcggcgccgcgtacaagatggccgttttgtggatttgttgtaccgtttcctgaaagcagggcacattgatcgtgggttgttcacggctagtagcgagggtgtaccgcagggtggtgtgctgagcccgctcctcagtaatattatgctgcatgaattcgacatgtggctcgaagcgaagtaccttaacaagaaagcgcgcaaagatcgttgggcgtggaatttcggcatccaacagggtcgtccgatcacggtgcgtgagaatcgccagtggaaaccggctgtggcgtattgccgctacgccgacgactttgtcgtaattgttaagggcactcgcgcgcaagcggaagaaattcgcgaagagtgtcgggcattcctcgaggggaaactgaaattgactctgaacatggaaaaaactcacgtgacccatgttgatgacggctttgtgttcctgggacaccgtattatccgtaaacgcggtgctcatggccgcatgagcattgttaccaccattccgaaagagaaagccaaaggctttgttcggcgtctgacagaaacgctgtccggcaatcattccgtatccaccgtcgatatgatcgcaggacttaaccgtcaactggtgggctgggcggcattttacaaattcaccgactttacggcatatgtgtttcgtcggattgatcatgttgtgttttggaaactggcccactggctgggccacaagtatcgctcgcgtattaagcctttaatgcgtaagtggttccgtgtcccagaacccgggaaagccaaaacctggctggtatttggccgtaacgagcgcggtgacccggtgggcaaagcgctgcatcgtttagtttctagcccgaaagcgcagtttcgctggcggaacccagaagaaaacccctatatttttcgcttagaggatcgctcaacggttacaagtcattatcatgacgttgcgatggccatgggacaggcctga

SEQ ID NO: 191 - DNA, 1566 bp, synthetic construct
  source 1..1566: mol_type = other DNA
atggctagcgcatggagtcatcctcaattcgaaaaatccggaatgcagaataaactggcgacgtgggcaacggaaagtaaagaacgtaagttcgatcgtttattacgtttaattgctaaccgcgcgtggctgagcgaagcggcttcgattacgttggcgtcttcaggcgcccggacgccgggtgtggatggaattaataaacataaaatggaagaaatgcttgatcttgagctggggaaccttcggtatgagttgctgaccggtacctattgcccacgtcccgcgcgtcgtgtgtatatcccgaaagccaatggaaaacttcgtccacttgggattccttgtctgcgtgatcggattgttcagcgcgccatggttatggtaatggaaccgatttgggaaagcgattttcatccccagtcatacggtttccggccagcacgttctgttcaccacgctatccgtactattaaaatgcagctccaagatggtaatgagcgcaccgatgcaactgcaggtcgctgggtggttgagggcgatctggcatcctacttcgacaccgtgcaccatcgcttactgatgaaaagtattcgtaagcggattagcgaccgccgtttcctcaccctgctgtggcggatcatcaaagccggctgtgtcgaccgcggcttgtttcgtgcatcctctgaaggtgtaccgcagggcggagtaatctcccctctgttgtccaacattatgttacacgagttcgaccaatggatggaagccaagtttttgagtaaaaaggtgcgtaaagatcgctgggcgtggaactttggtatccaaaatgagcgtcctatcgcaatccgcgaaaatcgccagtggaaaccggctattagctattgccgttacgcggacgactttgtcgttgtggtaaaaggcacgaaagcgcatgcggatgaagtccgtgaaacctgccgcgcgtttctcgaagatcgcctcaagctgactctgaacatggacaaaacacacattactcatgtgaatgatggtttcatcttcctcggacatcgcatcattcgtaaacgcggcgccaaaggtcgcatgcgtccggtttcgagcattccgtgggataagtatcgccgctttaccgaacgtgtcgtcaaacaactgtcaggcaactttagcatgaacaccatggatctggtggagagtctgaaccgccagttggtggggtgggctaacttctaccagtacaccgaccataccgtaacaatctatggcaaagtggaccgcacggtcttttggaaactgggttattggctggcccgtaagtataaacgtggctttcgctctctgatgcgtgattacgtgcgcagcccggagaaagggaaagcaaagatttgggttctgcagggccaaaattcacgtggcttttatggggaactggcgctgaaacgcctggtcacctcgcacaaaggttggtttacgtggcgtacaccggctgaaaacccgtacacactgcgttcggaaaaaccacgcactatccagagctactatgatgacgttgccttcgccttaagtaatgcgtga

SEQ ID NO: 192 - DNA, 1566 bp, synthetic construct
  source 1..1566: mol_type = other DNA
atggctagcgcatggagtcatcctcaattcgaaaaatccggaatgattatttcggaattgcagcgtaaactggccacgtggactgcctgtgacaagactcgccgtgtcaaccgtctgttacgtttgattagccaccatgagtggttatatcaggctgcgcagattacgttatcttcgaaaggtgcaaaaacgccgggcgtcgacggcattacgaaaattcatctgcagaccaatctgcatacatatctggcgcagatctcagatgacctgcggagcgggcattatcagccaatgccggctcgtcgcatctacattcctaaagcgaatggcaaacaacgtccgcttggcatcccgaccctgcgtgatcgcatcgtgcagcgcgcgatgttgatggcaatggagccaatttgggaaaacaattttcatagcctgagttatggctttcgcccggagcgcagcgtacatcacgcgattcgtactgttaaactgcagctgacggatggccgtacctctcgtggccgctgggtggtggaaggtgacctgagctcatgtttcgatactgtacaccatcagcttctgatgaaatgcgtgcgtaaacgcatttcatgccagcgttttaaccaccttttatggcaattcattaaggccggtcatattgaacggaatcttttttgcgccacgaccgaaggggtcccgcaagggggagtaatctccccgatcctttccaatatcatgttaaacgaattcgaccaatacctgaacgagtgctatctgggaaaaaaagtccgcaaagatcgttgcaactggaactcatctattaccgataaacgccctatcgcgtcgaaagaaaaccgccagtggaaacccgctgtaagctattgtcggtatgcggatgattttctggttatcgttaaaggcaataagcagcaggcagaagccattcgtgatcaatgccgtgatttcttggaaggtaagctgaaactcacattgaacatggaaaaaacccatattacccacatcaatgacggtttcgtcttcttaggtcaccgcctcatccgtaaacgtggtgtgaaaagtaatatgcgtgtggtcaccggaatcccactgggtaaagcgaaagcgttttcgcattccttgtcccaagctctgtctggcgatcacagttgctcaaaaatcgataaagttgagcagctcagccggaaactcaagggttgggcgcaattttaccgccacaccgactttaccagcaaagtttacaacaaaattgaccgtattgttttctggaagctggcaaagtggctcgcaagcaagtaccggtgttccattaaaagtctgatgatcaagtggatcaaacgccctaaagccaataaggccaagacgtgggtgctgttcggcaaaagtaatcgcgggaatctgtgtgaagtgtcgctgtttcgtctggtatcttcgccgaaactgccctttcgctggcgtttaccggaattgaacccatatcttcgtgatgagattcgcaaaaccgtgacatccagttaccgcgatgttgctatggcagtgagccataactga

SEQ ID NO: 193 - DNA, 1674 bp, synthetic construct
  source 1..1674: mol_type = other DNA
atgaacattgaggaagtacagcgccgtctttgggagcagagtcgtgctcatcggcagcaacgtgaaagcggctcccctctgttcccggcaaacccatatgacgatcgcatccgcaagcttatggatctgatgcataatcctacatggatcgctgcagcatgtgatcgcgtactgaaacgtagccgtggcaaagcggtgggtgtggatggtgttcgcgttcgtgactttgaacgttcctgcgagcaccgtctcgaggaactgcgccttgagctgaaacgtggcacgtaccaaccgctcccgctgcgtcgtgttgaaatcccgaaagctaatggcaaaatgcggcgcctggggattgcgtgtctgcgtgataaaattgtgcaggaagcgattcgtatggcgctggaaccgatctttgaggccgaatttcatcgtaattcgtacggtttccgccccaaccgttcggctcatcatgccattgcgcaatgccgcaacgcggcactggctggctatgcgtggacgatcgaaggagatgtaaaagcgtgttttgacgaaattgcgcacaaagccatcttgcgctgtgtccgtgagaaagtgatggataacaagttcctgaacctgattgaccgtttgctgaaggccggagttgaaattgatggcgttgtgcatcctacgactaaaggtgtcccgcagggtggcgtcgcgtcaccactgctggctaacgctgtgctgaacaagttagactggttcttgcagtctaaaggtttttatgatgccgccaaacgtcgtcgttcatctcatagtttaccaaacattcgcttctgccgctatgcggatgattggtgtgtattcgtcacccgctgcgatcgtcagtatgcggagcgcttgaaggacgaaatccgcgactttctgcgggaaacctgcggactggaactgagtgccgaaaaaacccgcattacccacgtacgtgacgggtacgatttcctgggcttcaacatttcggtaggggtgggccaaagcggcaaaatggttcccaaggttaaagtcggtcgtaaagcaattgcaaatatccaacgtcgtttaggggaatccttacgctatcgtcccatgcaagaatccatttcagtccggctggtccgtacgagtgcagttatccgcggctggagcaattattttaaagcggcacataactttagccgggtcgcacacggcctcgatcataaagccttctggattaccgctaaggcgatttgccgtaaagaagatatctctactgcgaagtgttttcgtcgctatcggctgggcaataaaatcggtgtgcacgaagcgtgcaccctcgcccgctttcaggagacagcgtcaagctattactacgccgccccgaaaccgtaccagccgggttgtaaccgctaccttgacgaccacgaatgggaagccgctttagtgctgtctgaacatgcgcgcccaggttcgggagatttgaaatggaaagcattggtgcgggatggttttcattgccgcgggtgtgccgttgtggtgtccgcacgcactagccatgcagaccacatccgcccggtgaatagctttgcgaatcttgagttagccaatgatcttgataatattcagaccctgtgccgttggtgtcacaaacagaaaagtgcccgtgaactctgcgcg

SEQ ID NO: 194 - DNA, 1692 bp, synthetic construct
  source 1..1692: mol_type = other DNA
atgtatccgaccaaaatggctgaaaaacaggcaaaactggcagagacagcgttatcgaatccggaacatcgtttccataatctgtatgatcttatgcattggcggtattggattgaagaagcggccgcaaaagtactggcccgccctggctcgagcacggcaggcgttgatggtaaaacacgcgttgatttcgaaaaaaattacgcgaccgaaatctcccgtattgtgaccgaactcaaagataagacctatgcaccgcaacccgtccgccgcatgcatatcccgaaaggtaacggcaagacccgccctttgggaatccccattctgcgggatcggattgttcaagaggctctccgcgcgattctggatccgatctacgaaagcgactttcaacatcactcatacgggtttcgtaaaggtcgttgtactatggatgccgttgcggttctgatgccattattcaatacgcaggtcaagcactattgggttattgagggagacatcaaaagttatttcgataatgtgcaccaccgcaagcttatgaaacttctccgtcagcgtatcgctgacaaagcgctgctcgacctgatctggaaattcttaaaagcaggtgtgatggaaggtcgtttatttgcctgtacagaaactggggttccacagggcggcgtgatcagcccgttgttggctaacgtctatctgaatgaatttgataagtgggcggaacgccagtggcacaacctgaccccgtacgaccgtcagcgtcgtcgccaagcgggcttgggcaactacactatggtacgttatgccgacgattttgtgattgtgtctaacggtactcgcgcggaagtggagcgcacgaaagaggcagtgcgccgttttttggcggaagagctgcacctggaactcagcgcggagaagacactgatcactcatgtgaacgacggttttgactttttagggtttcatattcagcgctgtaaacccgaaggccgctgggtagtccacctgcgtccgaccgaaaaaaacaagcagcgcattaaacaccgcatgaaagaactgacgagtcgcaactggacctggatggatgagtacactcgtctgacggccttgaaccgcattgttaaaggctggtgcatgtattaccgttacaccagcctgcactcagatcttgaagaaattactcgttacatttggttccgttatctgcagtggctcctgcgtaaacacaaaggctcccgtaaacatcagctgatccaggaaaaaacggccgtgattcataatcgcacccgttggacggccaccgtagcccaagacggtcaggcgattaccgcccatcaatggctgccgacgccaaaagagttaaaacgcgaacgttatcgtctgaaaggccgtggcgggttcgcgcacccttatcttgagccagctctggacaccaccgataacccggaatgggaagggggtccggccgaagtcctgttcaccgaggtcatcggtgcacgcagtcgtcgtggagaaccgttagagatggctgaactgaaattacgccgtaagctgcgggatcgctttacatgtcagcattgcggctcccgggagcatcttcaagtgcatcatgtcggtcctgtaacgtctacgtcgatcgatgatctgattaccctgtgcttgaagtgccatcagcagcaacatcggcagaat

SEQ ID NO: 195 - DNA, 1527 bp, synthetic construct
  source 1..1527: mol_type = other DNA
atgattatttctgaaatgcagcacaaacttgccacctgggcggaaagcgatcctaaccgtcgcttcgatcgtctgctgcgtctgatcgctaataaagagtggctggccgaggcggctcgcatggtactggcatccagcggtgcacggacgccgggcatcgatggcatggacaaacagcgtctgcaagtgaaactggatcagcatcttgacgatcttcgtgcctcgttattggaagaatcataccgtccgcagccggtcaaacgtatctacatccctaagagtaatggtaaacttcgcccattgggaatcccaaccctgactgatcgtatcgtccagcgcgctatgctgatggccatggaaccgatctgggaatcggactttcatcgcctcagctatggttttcgtcccgaacgttcagtgcatcacgcggttcgtacagtccgcattcaattacaggatggggcagataccacccgcggtcgttggattattgaaggtgatctggcctcttatttcgatacggtccatcaccgcttactgttaaaatgcgtgcggcgccgcgtacaagatggccgttttgtggatttgttgtaccgtttcctgaaagcagggcacattgatcgtgggttgttcacggctagtagcgagggtgtaccgcagggtggtgtgctgagcccgctcctcagtaatattatgctgcatgaattcgacatgtggctcgaagcgaagtaccttaacaagaaagcgcgcaaagatcgttgggcgtggaatttcggcatccaacagggtcgtccgatcacggtgcgtgagaatcgccagtggaaaccggctgtggcgtattgccgctacgccgacgactttgtcgtaattgttaagggcactcgcgcgcaagcggaagaaattcgcgaagagtgtcgggcattcctcgaggggaaactgaaattgactctgaacatggaaaaaactcacgtgacccatgttgatgacggctttgtgttcctgggacaccgtattatccgtaaacgcggtgctcatggccgcatgagcattgttaccaccattccgaaagagaaagccaaaggctttgttcggcgtctgacagaaacgctgtccggcaatcattccgtatccaccgtcgatatgatcgcaggacttaaccgtcaactggtgggctgggcggcattttacaaattcaccgactttacggcatatgtgtttcgtcggattgatcatgttgtgttttggaaactggcccactggctgggccacaagtatcgctcgcgtattaagcctttaatgcgtaagtggttccgtgtcccagaacccgggaaagccaaaacctggctggtatttggccgtaacgagcgcggtgacccggtgggcaaagcgctgcatcgtttagtttctagcccgaaagcgcagtttcgctggcggaacccagaagaaaacccctatatttttcgcttagaggatcgctcaacggttacaagtcattatcatgacgttgcgatggccatgggacaggcc

SEQ ID NO: 196 - DNA, 1521 bp, synthetic construct
  source 1..1521: mol_type = other DNA
atgcagaataaactggcgacgtgggcaacggaaagtaaagaacgtaagttcgatcgtttattacgtttaattgctaaccgcgcgtggctgagcgaagcggcttcgattacgttggcgtcttcaggcgcccggacgccgggtgtggatggaattaataaacataaaatggaagaaatgcttgatcttgagctggggaaccttcggtatgagttgctgaccggtacctattgcccacgtcccgcgcgtcgtgtgtatatcccgaaagccaatggaaaacttcgtccacttgggattccttgtctgcgtgatcggattgttcagcgcgccatggttatggtaatggaaccgatttgggaaagcgattttcatccccagtcatacggtttccggccagcacgttctgttcaccacgctatccgtactattaaaatgcagctccaagatggtaatgagcgcaccgatgcaactgcaggtcgctgggtggttgagggcgatctggcatcctacttcgacaccgtgcaccatcgcttactgatgaaaagtattcgtaagcggattagcgaccgccgtttcctcaccctgctgtggcggatcatcaaagccggctgtgtcgaccgcggcttgtttcgtgcatcctctgaaggtgtaccgcagggcggagtaatctcccctctgttgtccaacattatgttacacgagttcgaccaatggatggaagccaagtttttgagtaaaaaggtgcgtaaagatcgctgggcgtggaactttggtatccaaaatgagcgtcctatcgcaatccgcgaaaatcgccagtggaaaccggctattagctattgccgttacgcggacgactttgtcgttgtggtaaaaggcacgaaagcgcatgcggatgaagtccgtgaaacctgccgcgcgtttctcgaagatcgcctcaagctgactctgaacatggacaaaacacacattactcatgtgaatgatggtttcatcttcctcggacatcgcatcattcgtaaacgcggcgccaaaggtcgcatgcgtccggtttcgagcattccgtgggataagtatcgccgctttaccgaacgtgtcgtcaaacaactgtcaggcaactttagcatgaacaccatggatctggtggagagtctgaaccgccagttggtggggtgggctaacttctaccagtacaccgaccataccgtaacaatctatggcaaagtggaccgcacggtcttttggaaactgggttattggctggcccgtaagtataaacgtggctttcgctctctgatgcgtgattacgtgcgcagcccggagaaagggaaagcaaagatttgggttctgcagggccaaaattcacgtggcttttatggggaactggcgctgaaacgcctggtcacctcgcacaaaggttggtttacgtggcgtacaccggctgaaaacccgtacacactgcgttcggaaaaaccacgcactatccagagctactatgatgacgttgccttcgccttaagtaatgcg

SEQ ID NO: 197 - DNA, 1521 bp, synthetic construct
  source 1..1521: mol_type = other DNA
atgattatttcggaattgcagcgtaaactggccacgtggactgcctgtgacaagactcgccgtgtcaaccgtctgttacgtttgattagccaccatgagtggttatatcaggctgcgcagattacgttatcttcgaaaggtgcaaaaacgccgggcgtcgacggcattacgaaaattcatctgcagaccaatctgcatacatatctggcgcagatctcagatgacctgcggagcgggcattatcagccaatgccggctcgtcgcatctacattcctaaagcgaatggcaaacaacgtccgcttggcatcccgaccctgcgtgatcgcatcgtgcagcgcgcgatgttgatggcaatggagccaatttgggaaaacaattttcatagcctgagttatggctttcgcccggagcgcagcgtacatcacgcgattcgtactgttaaactgcagctgacggatggccgtacctctcgtggccgctgggtggtggaaggtgacctgagctcatgtttcgatactgtacaccatcagcttctgatgaaatgcgtgcgtaaacgcatttcatgccagcgttttaaccaccttttatggcaattcattaaggccggtcatattgaacggaatcttttttgcgccacgaccgaaggggtcccgcaagggggagtaatctccccgatcctttccaatatcatgttaaacgaattcgaccaatacctgaacgagtgctatctgggaaaaaaagtccgcaaagatcgttgcaactggaactcatctattaccgataaacgccctatcgcgtcgaaagaaaaccgccagtggaaacccgctgtaagctattgtcggtatgcggatgattttctggttatcgttaaaggcaataagcagcaggcagaagccattcgtgatcaatgccgtgatttcttggaaggtaagctgaaactcacattgaacatggaaaaaacccatattacccacatcaatgacggtttcgtcttcttaggtcaccgcctcatccgtaaacgtggtgtgaaaagtaatatgcgtgtggtcaccggaatcccactgggtaaagcgaaagcgttttcgcattccttgtcccaagctctgtctggcgatcacagttgctcaaaaatcgataaagttgagcagctcagccggaaactcaagggttgggcgcaattttaccgccacaccgactttaccagcaaagtttacaacaaaattgaccgtattgttttctggaagctggcaaagtggctcgcaagcaagtaccggtgttccattaaaagtctgatgatcaagtggatcaaacgccctaaagccaataaggccaagacgtgggtgctgttcggcaaaagtaatcgcgggaatctgtgtgaagtgtcgctgtttcgtctggtatcttcgccgaaactgccctttcgctggcgtttaccggaattgaacccatatcttcgtgatgagattcgcaaaaccgtgacatccagttaccgcgatgttgctatggcagtgagccataac

SEQ ID NO: 198 - DNA, 1899 bp, synthetic construct
  source 1..1899: mol_type = other DNA
atggctagcgcatggagtcatcctcaattcgaaaaatccggaatgacgaaacagaaaaaattgcgccaccttgaatattatgatcttcaggaacgttttgacgaattgttcgccaaaagtaaacaaggtgaactgttcaccaaccttatggaactgattagttccgaggagaatatcaaactcgcgtaccgtaatatcaaacgtaatgaaggctctaacacgagcggtgtagacggcaaaacgattaaagatattgaacgtgtctccgcggataaactcgtagaagtcattcagaataagtttcgtttctacaaaccgaagccggttcgccgcaaagaaattccaaaacctaatggcaaaacccgtccactgggcattccgacgattgaggatcgtttggttcagcaatgcatcctgcaagttctggaacctatttgtgaagcgaagtttcatgagcgcaataacggttttcgtccgaaccgttctgccgaacatgcactcgcgcaatgctaccgtatgattcagatccagcatctgcactttgtggtggacatcgatattaaaggtttttttgacaacgtgaaccatagcaaactgatccggcagatttggtcaatgggtattcgcgacaaaaagttaatctgcgtgattaaacagatgcttaaagccccgatcattatgcccgatgggacgacaattaaacccgataaagggactccgcagggtgggattctgagtccgctgctggctaacatcgccctgaacgaattggattggtggatcagctcgcagtgggaaaccatgccgacccatactcagtataaaccgcacatcagcaaaaacggcacaatttcttgcgcgaacaaatttcgggtgcttcaggaaagtaaacttaaagagatgtacattgtgcgctatgccgatgatttcaaaattttttgccgcaaacgcagcgacgccgacaaaattttcgtcgcagtaaaaaagtggctgaaagaacgtctgaaattagagatctcggaagaaaaatcgcgggtcgtgaacctgaagaagaaatgcagcgaattcttaggcttcgaactgaaagcggttcgtaaagcgaaaaaatatgtcgttcagtcccacatctctgagaaatcaaaaaaacgcgtgacggagactttgcataaaaagattgtggagatcgagcattcgaaaaacgctaaagaactgggaattcacgtgcgccaatacaacacggtggtcttcggtattcataactattaccgggtggcaacccatatcagctgtgactgttccgcaatctacaataccattcgtaaagcaatctataatcgcttacgtggacagttaaaaagcaagggagttatccactccgccttcattcaaaaaaactacggtaagtcgaaaatgatctgctttctgggcgacgcaccgctgattccctttagctatgtgcaaaccaaaactcctcgctacaagaaggttaaaatttgtaagtacaccccggaaggccgcagcgagatccacaagtgcctgaaatttgatgaatcagtaattgcggtgttacatatgctggcgaaaagtcatatgaatgggcgctcagtcgaatatatggataatcgtgtttctctgtatgctgcccagtatggcaagtgtgctgttaccggtaaagtcttgtggatcgatgaaatccactgtcaccataaaaaacctgtctcacagggtggcaccgatgagtataagaatttgattattgttcatgtaaacgctcaccgtttaattcatgcgactaatccagaaaccatcatggtatatctgaataagctgaatctgacaaaaccacaactcaaaaaactcaacaagctgcgcacaatggcaggcaatccggcgatttga

SEQ ID NO: 199 - DNA, 1941 bp, synthetic construct
  source 1..1941: mol_type = other DNA
atggctagcgcatggagtcatcctcaattcgaaaaatccggaatgactagccgtaacaaaaaacgtcgcaaactgcgtaacgccgaatactatgacattcagtccctgctggacaaactgtatgcagatagtaaaaacggtaaagtctttaccaacttggtcgaactcatttgcttgccgcggaacgtagagttggcatatcgtaacctgaaaaagaatagcggtagtaaaactgctggtgtggacgataaaacgatcgatgatctggcgggcctgaccaatgaacagattacggactacgtccgcacgcgtctgaactactacaaaccccatcgtgtgcgtcgcattgaaattcccaaaaaaaatggtaaaatgcgcccgctggggattccgacaatctatgatcgtttaatccaacaatgcatcttgcaaatcttagaaccaatttgtgaggcaaagttctacccacattcgtatggttttcgcccgaataagtgctgcgaacatgcgatggcgcgcgcgtataaacttgctcagaatcataagctgcaccatgttgtggaagtggacattaagggattttttgacaacgtgaatcacggaaagcttctgaagcagatgtggaccctcggtttacgcgataaaaaactgatttgcatcatctcacagatgctcaaagcggaaattgccggcattggcgtgcctaccaaaggtaccccacaaggcggaattctgagtccgttgttagcgaacatcgtgctgaacgaactggattggtggatcgcgtctcaatgggaaacttttccgacgcggcaccagtatcgttccgacgtcgtccgtgaaggcaaacctgggatcaatcatggtcatcgttatcgcgcacagcgtgagagcaacctgaaagaatgctatatcgttcgctacgctgatgatttcaaaattttctgtcggaataaggtggatgcggagcgcatttttcaggctacaacccagtggctgaaggaacgtctgttcttagaaatctcgccggaaaaaagccatattgtgaatcttcgcaaaggctatagcgagttcctgggtatccgttttaaacttgtagcgaaagggaaagaaaaagacggtaaaccgaaattcgtaatccgtagccatatttgtgacagcgcagtagaaaaaatcgccgagaaaatgtatgttgagatttcaaatcttgcgcactgtgcagataaccgccagctccatgtcgttgtcgataacattaacctgtacgtattgggaattcatcagtactaccaaatggccacgcacattgttactgatctgaatcccattaaccgttccgtgctctctcgcctggaacacaagaaaaacttgaaatgcttactgacggaacaggggaatgctaaactgcctaagtatgttgtccaaaaatactcagcgtctaagtgcgtacgttatattaaaggtcgtgcactgatcccaattggctatgtgcagaccaaaccgccgatgttttcgatctccggggtttgtaagtacactgccgagggccgcagtttaatccataacaatctccagacgattaacatctctacattacactatctgatgaaccacccgaacaaaaaccgctcgatcgaatataatgataatcgtctggccttattttgtgcccaaaatggcaagtgtgcaattaccggcaaagtgttggaaattggcgatattcactgtcatcatattgttcctatccacgccggcggcaccgacaaataccagaatctgaaaattgtttgcgtggatattcataaactgatccacgctgttgatgaacgcaccatccgtggcttgctcgagaaactggagcttacagcgtatcagatcaaacggcttaactacctgcggaaaatggccggtaatcaagaactgcagaccaaagccgcgtga

SEQ ID NO: 200 - DNA, 1980 bp, synthetic construct
  source 1..1980: mol_type = other DNA
atggctagcgcatggagtcatcctcaattcgaaaaatccggaatgaagctctccatcccaaaaagtgaggaagaattccagaaactcaaagacaaactgtttgaagagacgaaaaccgccttaagccagaataagactccgatcttcaaaaacatccttgaggtagcccaatgcgacgttgtgattctgaccgcgatccacaaacttaaaggcaataaaggatccaatactgcgggtgtcgatggtgaaacaatgcgtatggacatcctgaacaaagatttcaataaagtaatgaaggaagtgaagctccagttcacccactatacgcccgataaagttcgccgcgttcacattccgaagagcaacggtgagacgcgtcctctgggtattccgaccattgcggaccgtgttgtgcaggagtgcattcgtagtgtcattgaaccgatttgtgaggcacaattttttgaacatagctatggtttccgtccgtggcgtagtacggagaatgcactgggtcgtattaccgatgtggtccagaaaacagggtatcattggattatcgagggcgatatttcaaagttcttcgataaagtaaaccataccaaactgattcgcattctgtggtcgtttgggattcaagatcgtcgcattctgatgatgatcaaagctatgctccaagccgggatcatggaagaaatcaacaaaaacgaattggggacgcctcaaggcggcattattagccccctgctggcaaacgtttatctgacaccatttgataattttgtaacgcgggaatacgagaataaaaaattacgcaagaactattcgtccggccagcgctcactcattttgcgcggcttgtcagggaaacctcgcatcaaaccgattccgtgctacctgatccgctacgcggatgattgggtggtgatcaccaacagcaaaaaaaatgcagagaaactggtgtacaagtacgaaaaatatctgcgtgaaacgctgaagctggaattatctgcgtcaaaaaccaagatcacgaatgtccgttcgaaggcgattgaatttctgggatacaaatataaacaggttcgcggcaaagcgaccaaaggctacatctcccggaccaagcctattgaagaacagctggacaaaaaaattacagaactgttaaaggacatcaaacgcctcaagaaatgcaaagacactgaaactctgatttctgacatcaatattatcaacagcaaaatccggggcctggtcaattattatcaggtgactacttggggttccgaaagcatgaaaaaatacaatcagcgcgtgcgctgggctgcttttcgtgcaatccgtcgtcgcattggtgcaaaaagtgccaaaggcaaaaataaaaaagtggattgggtgcgtgcgaatctttgtgcgaatctggtaggtattcattcgaactataccacagcgttgccaagcctgaagtataaggaacatatcgttggcgttaccgatcttgcctttattaagtttcgtcagccggttctgttgaaccagaaagagacaccctttacccaggaaggacgcgaacgtcaccttgcacgtacccgtaaacgcccgccgcaatatcgtttagattttatttttggtgcagacgcgactaccacgaaacggttactggcttctcgtaaacggaaaaatcgtctgtacaattttgagttctacctgaaccgcgcctatgccttcaaccgcgataaaggtaagtgtcgtatttgcggaaaagaaattgctccgcatgaaatccagacccaccacgtcgatccatctttgaaaacggaattagtcaacaaagtgtcgaatcttgccagtctgcatgatacgtgtcataacaacatgcataacctgaccctgaccgaacagttgttgcaagccaaaggctatacgaacaccgcggtgaaaaaaatccttaacttccgcaacaaactcgctattactttatga

SEQ ID NO: 201 - DNA, 1863 bp, synthetic construct
  source 1..1863: mol_type = other DNA
atggctagcgcatggagtcatcctcaattcgaaaaatccggaatgaccctgaacacgaaaggtaaacgtgcagaataccacgatatcctgcccttacaaaatgaattatgggaaaatgatacgccgaagaacctttacaaactgatcacaagcaaacgtaatattatttgtgcttatgactgtctgcggcgtaacactggctcacatgcaaaaggcgtggatggcttgaacatcgaagatatcaatcatgtgtccctggatcggctgatcaaaactgtacgcgcaaaactgttggattataaaccggaccctgttaaacgggtttatatcgagaaagacaacggtaagtttcgtccgctgggcattccgaccatttgggatcgcttgattcagcagtgtattaaacagattatcgaaccgatttgcgaaaaacagtttgcgcacaattcgtatggcttccgcccaaaacgttcacaagaaaatgcattagcggatgtgatgaaatccttaaacctctctaaacaccggtacattgtcaatgtggacatcaagggtttctttgataacgtgaatcacaagattctgattaatcagctctggtccatcgggatcaaagacaagagtgtactgcagattattaaaaaaatgctgaaggccaaaatcttggaaccaaacggaaaacttatgacccctagcaaaggtaccccgcagggtggcattctctctcctctcttaagtaatgtagtgttgaacgacctggatcattgggttaatgatcagtggattgaatgtggcattgaaacaccaagcatcaccattcattggaacaaaaatggcagcccgggcggcgataagtatcgtcatctgcgcaaattcagcaccttgaaagaaggtcgtctggtgcgctacgccgacgactttgtgattacgtgcaaaacttacaacgaggcggttcgttggtcgcatgccgtgaccaattatctgaaacgtcgcctgaagctggaagttgaggattcgaagagtaagattattaacctgcgcaaaaaatactcggactttctggggtttaagtttaaactgaaaaagaaacggaataagtgggtcgctgaatcccgcattagcgataaaaaaaagaaaaaaatcctcgcgagctatcgccaacagattcgtaacacttggagcggcgcggaaatctacaaacttaataccaagacattcgggctgtgggaatattttgagaatgccacagctgtttctgtcgatatgtcagagattgcctggcgcctgagtaaaatcatctacaatcacttttcgatgaacggagaatttcgctatcttaccgaagcggaactgaaaagcaccggcgtcggtattaagatgacgaaacttcagaaccattgcaaagtttgggtccagcatggggtaccagtgatgccgttatctatgggaaaaacccgctatccgttatgcaaacgccgtcaagaaaaaccctacgagttcactcgtgaaaaaaaagactggcagagttatatcattctgattgagtctaacattacgtcaagcacgctgttccacatcaataaagtttcaaagtatgctcaacaaaaaggtaagtgcgcaattttgaaacagttcacgggtctggatttccattgtcatcacatcatcccgcgttatctcgggggtgatgattcctacgaaaacctgattgtgttagaccgtcgggtccataaccttatccacgcccgctatgactggaaaatcaaagagatgatcaaagagttgaacctgaacaaacagcagattgcgaaaatcaacaaacttcgtaaccaatgcaaactgaatgagattgaaattgattga

SEQ ID NO: 202 - DNA, 1953 bp, synthetic construct
  source 1..1953: mol_type = other DNA
atggctagcgcatggagtcatcctcaattcgaaaaatccggaatggccaaacgcattgtgaataaagcagaacgtaacgccgaacgctatgatgctaaagaaatgggataccagttatatgaagatagcctcaacggtcgcgttttcgaccgtctgatgcctatgatcatttcggagcagaacattatcttagcgtatcggaatatctgtaaaaacaacgggagcaagacgccgggtactgatggcaaaacaattgttgaaatccaagaactcccaattgagatggtcattaaaaccatccgtaacaaacttaattactatcaacccaagaaggtccgtcgcgttgaaattcccaaagataacggcaaaactcgtccactgggtattccgtctatttgggatcgtctgattcagcagtgcgtgttacaagttctggaaccgatctgtgaggcaaagttccatgagcgtaacaatggttttcgcccatatcgctccacacagaatgcaattgcgcagtgctataagatggcccagctccagaacctgcattttgtagttgatgtcgatatcaccggctttttcgacaatattgaccatagcaaactgatccgccagttgtggggacttggcattcaggaccgcaaactgattatgattatcaagcagatgctgaaagccgacattttattcaacgatatcgtgattaccccggaaaccggcacccctcaaggtgggatcctgagccccctgctggctaatgttgtcctcaacgaacttgattggtgggtcgcgaatcagtgggaaatgttcaaaatcaaagagggttctacgggttatgagtttgcgaaagtcgataaagaaggcaatgttttaactgttgatcgtacccagaaatggaataaactgcgtgccaaaacggaattgaaggagatgtatattgtgcggtacgcggatgattttaaaatcttctgccgtgattacgttaccgcaacaaaagtgatgtatgccaccaaactgtggctggaagaaaacttgcacctgcagacctcggatgaaaaatctggcatcacgaaccttcgtaaaaactacacgacgtttctgggtattaagtttaaggtcgtgccgaaagggaataagtggattattcggtcccacatggctgacaaaagtaaagcaaaggtaatctcaaaactgagcagcgtgtggaaagacatcaaaaatccatctaaacaaagtgagctggacaaaaacattaatttgtacaatgcgatggtaatgggaatgcataactattattgcatggcgaccctggtgtccgctgattttgctgaaattgcttttaaagtaactggtaaaagtaacggtatgaaccacaatcggtggtgctttccgattgaaaaacagggagagatcacatccaagtacattttggaaaaatacggcaaaagcaaacaattccgttggattaatgggcgtatgatcgtgccgattggctatgtggcctacgaatatccgaaatacaaacgtcgcgaagtcaataagtacgtacgcaaatattcggacgccgagaactgtatctcattcgaagtgatgaaatatatgatggaaaacgcgcacctgtacccgaccttggaaatggcggataatgccttaagtcgttatattgcgcaaaaaggcaagtgcgcggtgacgcacaatgcattaacggttgtggatatggtgtgtgagcatattaaaccgtgtaaaggcgaacgcaatgatacctaccgtaatcttattatcctgtcaaaagaggtatcggaccttgtcggggcagaaaactcaaacaagatcgacaaaattctcaaaaacttgctgctgactaaagagatgcaggacaaaatcaacaagctgcgcgaacatcgcgaactggaacctattcaatttgatgattatatcggcaccaaaaaatga

SEQ ID NO: 203 - DNA, 1854 bp, synthetic construct
  source 1..1854: mol_type = other DNA
atgacgaaacagaaaaaattgcgccaccttgaatattatgatcttcaggaacgttttgacgaattgttcgccaaaagtaaacaaggtgaactgttcaccaaccttatggaactgattagttccgaggagaatatcaaactcgcgtaccgtaatatcaaacgtaatgaaggctctaacacgagcggtgtagacggcaaaacgattaaagatattgaacgtgtctccgcggataaactcgtagaagtcattcagaataagtttcgtttctacaaaccgaagccggttcgccgcaaagaaattccaaaacctaatggcaaaacccgtccactgggcattccgacgattgaggatcgtttggttcagcaatgcatcctgcaagttctggaacctatttgtgaagcgaagtttcatgagcgcaataacggttttcgtccgaaccgttctgccgaacatgcactcgcgcaatgctaccgtatgattcagatccagcatctgcactttgtggtggacatcgatattaaaggtttttttgacaacgtgaaccatagcaaactgatccggcagatttggtcaatgggtattcgcgacaaaaagttaatctgcgtgattaaacagatgcttaaagccccgatcattatgcccgatgggacgacaattaaacccgataaagggactccgcagggtgggattctgagtccgctgctggctaacatcgccctgaacgaattggattggtggatcagctcgcagtgggaaaccatgccgacccatactcagtataaaccgcacatcagcaaaaacggcacaatttcttgcgcgaacaaatttcgggtgcttcaggaaagtaaacttaaagagatgtacattgtgcgctatgccgatgatttcaaaattttttgccgcaaacgcagcgacgccgacaaaattttcgtcgcagtaaaaaagtggctgaaagaacgtctgaaattagagatctcggaagaaaaatcgcgggtcgtgaacctgaagaagaaatgcagcgaattcttaggcttcgaactgaaagcggttcgtaaagcgaaaaaatatgtcgttcagtcccacatctctgagaaatcaaaaaaacgcgtgacggagactttgcataaaaagattgtggagatcgagcattcgaaaaacgctaaagaactgggaattcacgtgcgccaatacaacacggtggtcttcggtattcataactattaccgggtggcaacccatatcagctgtgactgttccgcaatctacaataccattcgtaaagcaatctataatcgcttacgtggacagttaaaaagcaagggagttatccactccgccttcattcaaaaaaactacggtaagtcgaaaatgatctgctttctgggcgacgcaccgctgattccctttagctatgtgcaaaccaaaactcctcgctacaagaaggttaaaatttgtaagtacaccccggaaggccgcagcgagatccacaagtgcctgaaatttgatgaatcagtaattgcggtgttacatatgctggcgaaaagtcatatgaatgggcgctcagtcgaatatatggataatcgtgtttctctgtatgctgcccagtatggcaagtgtgctgttaccggtaaagtcttgtggatcgatgaaatccactgtcaccataaaaaacctgtctcacagggtggcaccgatgagtataagaatttgattattgttcatgtaaacgctcaccgtttaattcatgcgactaatccagaaaccatcatggtatatctgaataagctgaatctgacaaaaccacaactcaaaaaactcaacaagctgcgcacaatggcaggcaatccggcgatt

SEQ ID NO: 204 - DNA, 1896 bp, synthetic construct
  source 1..1896: mol_type = other DNA
atgactagccgtaacaaaaaacgtcgcaaactgcgtaacgccgaatactatgacattcagtccctgctggacaaactgtatgcagatagtaaaaacggtaaagtctttaccaacttggtcgaactcatttgcttgccgcggaacgtagagttggcatatcgtaacctgaaaaagaatagcggtagtaaaactgctggtgtggacgataaaacgatcgatgatctggcgggcctgaccaatgaacagattacggactacgtccgcacgcgtctgaactactacaaaccccatcgtgtgcgtcgcattgaaattcccaaaaaaaatggtaaaatgcgcccgctggggattccgacaatctatgatcgtttaatccaacaatgcatcttgcaaatcttagaaccaatttgtgaggcaaagttctacccacattcgtatggttttcgcccgaataagtgctgcgaacatgcgatggcgcgcgcgtataaacttgctcagaatcataagctgcaccatgttgtggaagtggacattaagggattttttgacaacgtgaatcacggaaagcttctgaagcagatgtggaccctcggtttacgcgataaaaaactgatttgcatcatctcacagatgctcaaagcggaaattgccggcattggcgtgcctaccaaaggtaccccacaaggcggaattctgagtccgttgttagcgaacatcgtgctgaacgaactggattggtggatcgcgtctcaatgggaaacttttccgacgcggcaccagtatcgttccgacgtcgtccgtgaaggcaaacctgggatcaatcatggtcatcgttatcgcgcacagcgtgagagcaacctgaaagaatgctatatcgttcgctacgctgatgatttcaaaattttctgtcggaataaggtggatgcggagcgcatttttcaggctacaacccagtggctgaaggaacgtctgttcttagaaatctcgccggaaaaaagccatattgtgaatcttcgcaaaggctatagcgagttcctgggtatccgttttaaacttgtagcgaaagggaaagaaaaagacggtaaaccgaaattcgtaatccgtagccatatttgtgacagcgcagtagaaaaaatcgccgagaaaatgtatgttgagatttcaaatcttgcgcactgtgcagataaccgccagctccatgtcgttgtcgataacattaacctgtacgtattgggaattcatcagtactaccaaatggccacgcacattgttactgatctgaatcccattaaccgttccgtgctctctcgcctggaacacaagaaaaacttgaaatgcttactgacggaacaggggaatgctaaactgcctaagtatgttgtccaaaaatactcagcgtctaagtgcgtacgttatattaaaggtcgtgcactgatcccaattggctatgtgcagaccaaaccgccgatgttttcgatctccggggtttgtaagtacactgccgagggccgcagtttaatccataacaatctccagacgattaacatctctacattacactatctgatgaaccacccgaacaaaaaccgctcgatcgaatataatgataatcgtctggccttattttgtgcccaaaatggcaagtgtgcaattaccggcaaagtgttggaaattggcgatattcactgtcatcatattgttcctatccacgccggcggcaccgacaaataccagaatctgaaaattgtttgcgtggatattcataaactgatccacgctgttgatgaacgcaccatccgtggcttgctcgagaaactggagcttacagcgtatcagatcaaacggcttaactacctgcggaaaatggccggtaatcaagaactgcagaccaaagccgcg

SEQ ID NO: 205 - DNA, 1935 bp, synthetic construct
  source 1..1935: mol_type = other DNA
atgaagctctccatcccaaaaagtgaggaagaattccagaaactcaaagacaaactgtttgaagagacgaaaaccgccttaagccagaataagactccgatcttcaaaaacatccttgaggtagcccaatgcgacgttgtgattctgaccgcgatccacaaacttaaaggcaataaaggatccaatactgcgggtgtcgatggtgaaacaatgcgtatggacatcctgaacaaagatttcaataaagtaatgaaggaagtgaagctccagttcacccactatacgcccgataaagttcgccgcgttcacattccgaagagcaacggtgagacgcgtcctctgggtattccgaccattgcggaccgtgttgtgcaggagtgcattcgtagtgtcattgaaccgatttgtgaggcacaattttttgaacatagctatggtttccgtccgtggcgtagtacggagaatgcactgggtcgtattaccgatgtggtccagaaaacagggtatcattggattatcgagggcgatatttcaaagttcttcgataaagtaaaccataccaaactgattcgcattctgtggtcgtttgggattcaagatcgtcgcattctgatgatgatcaaagctatgctccaagccgggatcatggaagaaatcaacaaaaacgaattggggacgcctcaaggcggcattattagccccctgctggcaaacgtttatctgacaccatttgataattttgtaacgcgggaatacgagaataaaaaattacgcaagaactattcgtccggccagcgctcactcattttgcgcggcttgtcagggaaacctcgcatcaaaccgattccgtgctacctgatccgctacgcggatgattgggtggtgatcaccaacagcaaaaaaaatgcagagaaactggtgtacaagtacgaaaaatatctgcgtgaaacgctgaagctggaattatctgcgtcaaaaaccaagatcacgaatgtccgttcgaaggcgattgaatttctgggatacaaatataaacaggttcgcggcaaagcgaccaaaggctacatctcccggaccaagcctattgaagaacagctggacaaaaaaattacagaactgttaaaggacatcaaacgcctcaagaaatgcaaagacactgaaactctgatttctgacatcaatattatcaacagcaaaatccggggcctggtcaattattatcaggtgactacttggggttccgaaagcatgaaaaaatacaatcagcgcgtgcgctgggctgcttttcgtgcaatccgtcgtcgcattggtgcaaaaagtgccaaaggcaaaaataaaaaagtggattgggtgcgtgcgaatctttgtgcgaatctggtaggtattcattcgaactataccacagcgttgccaagcctgaagtataaggaacatatcgttggcgttaccgatcttgcctttattaagtttcgtcagccggttctgttgaaccagaaagagacaccctttacccaggaaggacgcgaacgtcaccttgcacgtacccgtaaacgcccgccgcaatatcgtttagattttatttttggtgcagacgcgactaccacgaaacggttactggcttctcgtaaacggaaaaatcgtctgtacaattttgagttctacctgaaccgcgcctatgccttcaaccgcgataaaggtaagtgtcgtatttgcggaaaagaaattgctccgcatgaaatccagacccaccacgtcgatccatctttgaaaacggaattagtcaacaaagtgtcgaatcttgccagtctgcatgatacgtgtcataacaacatgcataacctgaccctgaccgaacagttgttgcaagccaaaggctatacgaacaccgcggtgaaaaaaatccttaacttccgcaacaaactcgctattacttta

SEQ ID NO: 206 - DNA, 1818 bp, synthetic construct
  source 1..1818: mol_type = other DNA
atgaccctgaacacgaaaggtaaacgtgcagaataccacgatatcctgcccttacaaaatgaattatgggaaaatgatacgccgaagaacctttacaaactgatcacaagcaaacgtaatattatttgtgcttatgactgtctgcggcgtaacactggctcacatgcaaaaggcgtggatggcttgaacatcgaagatatcaatcatgtgtccctggatcggctgatcaaaactgtacgcgcaaaactgttggattataaaccggaccctgttaaacgggtttatatcgagaaagacaacggtaagtttcgtccgctgggcattccgaccatttgggatcgcttgattcagcagtgtattaaacagattatcgaaccgatttgcgaaaaacagtttgcgcacaattcgtatggcttccgcccaaaacgttcacaagaaaatgcattagcggatgtgatgaaatccttaaacctctctaaacaccggtacattgtcaatgtggacatcaagggtttctttgataacgtgaatcacaagattctgattaatcagctctggtccatcgggatcaaagacaagagtgtactgcagattattaaaaaaatgctgaaggccaaaatcttggaaccaaacggaaaacttatgacccctagcaaaggtaccccgcagggtggcattctctctcctctcttaagtaatgtagtgttgaacgacctggatcattgggttaatgatcagtggattgaatgtggcattgaaacaccaagcatcaccattcattggaacaaaaatggcagcccgggcggcgataagtatcgtcatctgcgcaaattcagcaccttgaaagaaggtcgtctggtgcgctacgccgacgactttgtgattacgtgcaaaacttacaacgaggcggttcgttggtcgcatgccgtgaccaattatctgaaacgtcgcctgaagctggaagttgaggattcgaagagtaagattattaacctgcgcaaaaaatactcggactttctggggtttaagtttaaactgaaaaagaaacggaataagtgggtcgctgaatcccgcattagcgataaaaaaaagaaaaaaatcctcgcgagctatcgccaacagattcgtaacacttggagcggcgcggaaatctacaaacttaataccaagacattcgggctgtgggaatattttgagaatgccacagctgtttctgtcgatatgtcagagattgcctggcgcctgagtaaaatcatctacaatcacttttcgatgaacggagaatttcgctatcttaccgaagcggaactgaaaagcaccggcgtcggtattaagatgacgaaacttcagaaccattgcaaagtttgggtccagcatggggtaccagtgatgccgttatctatgggaaaaacccgctatccgttatgcaaacgccgtcaagaaaaaccctacgagttcactcgtgaaaaaaaagactggcagagttatatcattctgattgagtctaacattacgtcaagcacgctgttccacatcaataaagtttcaaagtatgctcaacaaaaaggtaagtgcgcaattttgaaacagttcacgggtctggatttccattgtcatcacatcatcccgcgttatctcgggggtgatgattcctacgaaaacctgattgtgttagaccgtcgggtccataaccttatccacgcccgctatgactggaaaatcaaagagatgatcaaagagttgaacctgaacaaacagcagattgcgaaaatcaacaaacttcgtaaccaatgcaaactgaatgagattgaaattgat

SEQ ID NO: 207 - DNA, 1908 bp, synthetic construct
  source 1..1908: mol_type = other DNA
atggccaaacgcattgtgaataaagcagaacgtaacgccgaacgctatgatgctaaagaaatgggataccagttatatgaagatagcctcaacggtcgcgttttcgaccgtctgatgcctatgatcatttcggagcagaacattatcttagcgtatcggaatatctgtaaaaacaacgggagcaagacgccgggtactgatggcaaaacaattgttgaaatccaagaactcccaattgagatggtcattaaaaccatccgtaacaaacttaattactatcaacccaagaaggtccgtcgcgttgaaattcccaaagataacggcaaaactcgtccactgggtattccgtctatttgggatcgtctgattcagcagtgcgtgttacaagttctggaaccgatctgtgaggcaaagttccatgagcgtaacaatggttttcgcccatatcgctccacacagaatgcaattgcgcagtgctataagatggcccagctccagaacctgcattttgtagttgatgtcgatatcaccggctttttcgacaatattgaccatagcaaactgatccgccagttgtggggacttggcattcaggaccgcaaactgattatgattatcaagcagatgctgaaagccgacattttattcaacgatatcgtgattaccccggaaaccggcacccctcaaggtgggatcctgagccccctgctggctaatgttgtcctcaacgaacttgattggtgggtcgcgaatcagtgggaaatgttcaaaatcaaagagggttctacgggttatgagtttgcgaaagtcgataaagaaggcaatgttttaactgttgatcgtacccagaaatggaataaactgcgtgccaaaacggaattgaaggagatgtatattgtgcggtacgcggatgattttaaaatcttctgccgtgattacgttaccgcaacaaaagtgatgtatgccaccaaactgtggctggaagaaaacttgcacctgcagacctcggatgaaaaatctggcatcacgaaccttcgtaaaaactacacgacgtttctgggtattaagtttaaggtcgtgccgaaagggaataagtggattattcggtcccacatggctgacaaaagtaaagcaaaggtaatctcaaaactgagcagcgtgtggaaagacatcaaaaatccatctaaacaaagtgagctggacaaaaacattaatttgtacaatgcgatggtaatgggaatgcataactattattgcatggcgaccctggtgtccgctgattttgctgaaattgcttttaaagtaactggtaaaagtaacggtatgaaccacaatcggtggtgctttccgattgaaaaacagggagagatcacatccaagtacattttggaaaaatacggcaaaagcaaacaattccgttggattaatgggcgtatgatcgtgccgattggctatgtggcctacgaatatccgaaatacaaacgtcgcgaagtcaataagtacgtacgcaaatattcggacgccgagaactgtatctcattcgaagtgatgaaatatatgatggaaaacgcgcacctgtacccgaccttggaaatggcggataatgccttaagtcgttatattgcgcaaaaaggcaagtgcgcggtgacgcacaatgcattaacggttgtggatatggtgtgtgagcatattaaaccgtgtaaaggcgaacgcaatgatacctaccgtaatcttattatcctgtcaaaagaggtatcggaccttgtcggggcagaaaactcaaacaagatcgacaaaattctcaaaaacttgctgctgactaaagagatgcaggacaaaatcaacaagctgcgcgaacatcgcgaactggaacctattcaatttgatgattatatcggcaccaaaaaa

SEQ ID NO: 208 - DNA, 1317 bp, synthetic construct
  source 1..1317: mol_type = other DNA
atggctagcgcatggagtcatcctcaattcgaaaaatccggaatggacggttcgaagctcaaagttaaaagtttcgaaatcccgaaacgcctggtctatgaagcgtgggaaaaagtgcgggcaaataaaggtgcccctggcgttgatgcagttagcatcaaccagttcgctgcggccgaagccgataacctgtacaagctttggaaccgtatgtcatctggtagttatatgcccggagccgtgcgcgcagttgagatccctaaagatcacgggttaggcgtccgtacgctgggtgtagccaacaccgcggatcgtgtggcccagacagccgctgcgatgctgttagaagaacgcctggaaccaatctttcatccggactcgtatggctatcgtccaggccgctcagctcacgatgcgctggctgtggcgcgcaaacgttgttggtcgcaggactgggtgattgatcttgacattcgcgcttttttcgattccgtaccgcacgacttgttactgaaagctgttgcacatcataccgaagaacgttgggtgttgctgtacattgagcgttggctgaaagcaccaatgcagatgccggacgggacactggtggcccgcgaacgcggcaccccacagggtagtcccatctctccgctgttggcgaatctttttatgcattacgcctttgaccgttggatggcgcgcgatcacccgggttgtccgtttgagcggtatgccgatgatattgtcgcacattgcgacagcaaagaacaggcctgcagcctgctggcggcgattgcggaacgtctcggggcagttggcctggagttgcatccggataaaaccaagattgtgttttgcaaggatgccaatcgtccgggtaccagcgaacacacgagctttgatttcctgggttatactttccgtggacgtctggctcccggtcctcgcggctactttgtatccttttccccggcgatgagtaccaaagccaaaaaagcggtcggccaaaaggttcgcgcgtggcatctgaatcgccgtacgggcacggatctctcaggtttagccgaggatattaacccgcacgtgcgcgggtggattaattactacggagcgttctatcgttcggagctgcacagcctcgctcgccgtatcgatgaacatcttgtccgctgggcgatgcacaagttcaaacggttgcgtggcaaaccgtctcgggcatgggactgggtggcggcagcgcgtcaacgccaacctaaactttttgcacattggcatctggtaagctccactcgtggccgtttagtcggcgcagtatga

SEQ ID NO: 209 - DNA, 1284 bp, synthetic construct
  source 1..1284: mol_type = other DNA
atggctagcgcatggagtcatcctcaattcgaaaaatccggaatggcgaaaagttttaatctgtctaagttcgctgtctgggatgcttacctggctgttaaagcgaataaaggtagcgcgggcattgatggacagacgatggaagatttcgaaagcgacttgaaatgtaacctttacaagatctggaaccgtctgtcgtcaggtagctatttcctgccgccggttcggcgcgttgaaattcccaaaagtaatggtacgttgcgcccacttggcattccgaccatttcggaccgtatcgcgcaaatggtgattaaaaaacgcctggagcctctggtggaaccacattttcatgatgattcctatggctaccgtcctaacaaaagcgccctggacgcaattgcacagactcgccgtcgttgttggcgcgatgactgggttttagatatggacatccagggcttttttgacgccctcgatcacaaacttgtgatgatcgcggtgtcgcgcttcacccagtgtaagtggacgatgctgtacatcgaacgttggctgaaagcagatgtcgtgatgccgaacggggaacgtgtcaaacggacccaaggtaccccgcagggcggcgtggtcagcccgttgattgccaatatctttctccatctgggttttgattcctggatgcagaaagaattcccgtgcatccattttgaacgttatgcggacgatattgtagtacattgtcgttcccagaagcaactggaatacattggacagatgattaaaagtcgcttcgcgcaatgcaaactgtctttatgccaggagaaaacaaaaatcgtatactgcaaagattcgaaacgtttagggacctactcatcacaatcttttgacttcctgggttatacattccgcccgcgctcctgccgtgataaagagggcaagttttttgtcagtttcacccccgccgtgtctcgcaaaagtatgaaagccattcggctgaaaatcaaggaacacccaatggtgaaagggtgtttttcacagggaattagcgaattggcacgtgcgattaaccctatgattcaaggttggattaattattatggccattttcgcaagagcgagatgagcactatctatgattatatcaacgagaaaatcatgaagtgggcgatgcgcaagtttaaacaccttcagcggcgtaaaaaacgtgccggccagtggctgcgcaaactgtattccaaagccccgttactcttcgctcactggcgtatttggaaatgggttgcagaatga

SEQ ID NO: 210 - DNA, 1347 bp, synthetic construct
  source 1..1347: mol_type = other DNA
atggctagcgcatggagtcatcctcaattcgaaaaatccggaatgtcaaccgaattagagcgtatcagtaagcttgctggcgaaaatcggcagctcaaattcttgtcaatcgcccacctgctgacgcctgaggcgctgatggaagcgtttaaaagtctgcgcaaagatgcgtcggccggtgttgacggtgttgcgtacggtgagtatcgtatggaagctggccgccgtattcaggagttatatgaacgggtccgcggaaaacgctatcgtgcccagccgttgcgtcgcatctacattccgaaagaaggcggaaaacagcggccgatcagcatccccacagtcgcagatcgcatcgcccaaactgttgtcactatggttttagaaccagaggtggagccgcgctttcatccggactcctatggttatcgtccgggccgctccgcactggatgccgttgggaaagctcgcgaacgttgctggcgttacgactgggtaattgatcttgatatcaaagcattttttgactctctcgattgggacctggtggaacgcgctgttgcgcatcataccgagctggcgtgggtccgcctctacattgcacgttggctgcgtgccccggtgcaaaaaccagatggtaccgtagaactccgtaccaaaggcacgcctcaagggggtgtggcgtctccgctgctttccaatctgtttctgcactatgcatttgatatgtggatgcagcgttcgtttccgtcagtaccattcgaacgctatgcggatgatgcgattgtccactgtggctcggaacgtcaagcaaaaatggtcttgagtgcgattcgtgaccgctttgctgagtgcggtctggaactgcatcctaccaaaacccggatcgtgtattgccaggatagcgaccgcctgggcaagtacgagcatgtgagtttcgacttcttaggctacacgttccagccacgtcgtgctaaaaaccatcgtggaaagttcttcgtgagcttcttacccgcgattagcacaaaagccgcaaaagccattcgcgccactattcgcgaatggcgtctggccagcacgcgtaacaaccagtcgctggaagatcttgcccagctgattaacccggtggtacgcggctggatgaactattacggccggtattatcgctctaagtgtgttcaagtgctgcgccacgtgaatcttgcgttggcggcttgggcacgtcgtaagtaccgccgttttaaacgtcgtgaacgcgaatccctgcactggttaggtcgtattgcgcggcgtgatcccaatctgtttgtgttgtggcgcctcgggatccgcccggaagcagggagctga

SEQ ID NO: 211 - DNA, 1290 bp, synthetic construct
  source 1..1290: mol_type = other DNA
atggctagcgcatggagtcatcctcaattcgaaaaatccggaatgaatgaagccaaaccatttgttgtcgaaaaacgcgttgtgatggaaagctggctgcaggtcaaagcaaatcgcggctctgcgggcatcgacggaatcgatttgaaatcctacgagtctaacctgcagaagaacctgtataaactttggaatcggatgagtagcggctcttacttcccgaaagcggtcaaacttgtagaaattcccaaacctaacgggggcaaacgtccgctcggtatcccaaccgtagaagatcgggttgctcagatggttgtcgtaatgtatatcgctccgcgtctggaagccatttttcacgatgatagttatggttatcgtcctatgcgtagcgcgcattcagcgatcgctaaagcaattgagcgctgcaatgaaaatttgtgggtgctggatatggacatctctaagtttttcgataccattgatcgcggtttactgatgaaggcggtgcaaaaacatgtttccgaaaaatggattctgttgtacattgaacgttggctcaaagtgccgtatcagacgagcgatggcggtgttgtagaccgtatgatgggcgttcctcaagggtcggtcattggcccggtactggccaaccttttcctgacatatgtgtttgatttgtggatgaagcattactttccgacgattccgtttgaacgttatgctgatgacaccatctgccactgccgcacggagaaacagacccaatatctgaaagcatgcctggtgaagcgtttcgccgattgtggattaaagctcaatgaggaaaaaacgaagattgtctactgtaaagacagcaaccgtaaaggcaattccgaacataccagctttgacttcttaggttatacttttcgcccgcgtaaagcaaaaaactcaaaaacagggcagattttcaccgccttttcaccagcaattagcaaaaaaagtatgatgaaaatcaaaaccgaaattcgctcgtggcatctgaaccgtcaaactcatctgagcatcgaacagatcgcggaacgtattaatcccatcgtgtcgggttggatgaactactatacgcgctttggtaaaagtgagttctggaaggtgatgtcctacctgaacgagcgtttatcgcggtgggtgaaacgcaagtataaacgtttccgcactaaactgtcgaaagcgtacgactggcttgtggagtgtgccgcgcataaccgccacatgttttcacactggatgagtggctacatcccgcactcctga

SEQ ID NO: 212 - DNA, 1293 bp, synthetic construct
  source 1..1293: mol_type = other DNA
atggctagcgcatggagtcatcctcaattcgaaaaatccggaatgatccagacgaaaagtcaggacatcaccaaacgccaggtatgggaagcctataagaaagtgaaacgtaacaaaggtagcgcgggcgtggacggtgtcgattttgaaacatttgaggcgaaccttgagaacaatctctacaagctttggaatcgcctgagctcaggatcgtatatgccgcctgctgtcctgcgcgtagaaatcccgaaaagtgatggcggtgttcgtgtcctggggattccgaccattgccgaccgcgtggcccagatggttgttaaagactacctggagccgaaacttgaaaaaatttttcataacgattcctatggttaccggcctaaaaaatccgcacaccaggctctggaaacgacccgtaaacgttgttggcagtacccctttgttctggatctggatatcaaaggcttctttgataacattgaccatgagctgatgatcaaagcactggaattgcacatggataccaagtgggaaatgttatacatcaaacgttggttagtagctccggttcaaacaaaagaaggcctgcaacaacgcgagcgtggtacgccgcagggtggggtgatctctccactgctggcgaacttgttcttgcattatgcgttcgacgtctggatgcggaagaactatcctaccattccgttcgagcgctatgcagacgatgccgtgtgccattgccgcagccagcgtgaggcccaacagctgaaagccgatctgagccagcgcatggaagcgtgtaaacttgaattacacccggataaaactaaagtcgtgtactgcaaagatgacaagcgtcgtggcgaatatgaaaatgtctcattcgactttctgggctttacctttcagccccgtgtggccaaaaactcaaagacgggagagttctttgtaggctttaatccggcgattagcactaaagcggcaaaacgtattcgcctggttatgcgtcgttggaaagtgcaactgatgtcccacctctcgctcgaagaattatcggatcgcttgtctcgcgtgatccgcggctgggtgaattactattctattttcgcacggcacaaacttctggatgtgatgcgctatttcgatcgccgtttagaacgttgggcaaagcgtaagtttaaaagtctcaaacgtcgtcaagggcgcgcgcataagtggttgatgcgtattgcgcggaaagaaccaaatctgtttccacattggcagatgaaatatgctaagctgactgttcgctga

SEQ ID NO: 213 - DNA, 1275 bp, synthetic construct
  source 1..1275: mol_type = other DNA
atggctagcgcatggagtcatcctcaattcgaaaaatccggaatgcatgatatttctaaagaagaaccttttcgtgcctgggaacgcgttaaaaaagcaggtgggggcgcaggctacgacgggaagaaaatccaagacgttcagctggaccttgataatcagctgtacaaaacatggaaccggttgagcagcggctcctacatggcggccccggtacttctggtcgagattccgaaagctggcggcggcaaacgcaccctgggtattccaacggtcatggatcgcgtagcacagatggttatcaaagatcgcctcgaacagatcttagagccgaagttccacaaagattcttacgcgtatcggccagacaaaagtgcgattgatgctgtgggtaaagcgcgtgagcgctgctttcaacgcaagtgggtgattgaccttgatatcaaagggtttttcgacaacattgatcactccatgatgatggagttcctgctgcaacatacgaaagacaagacgatcgtaatgtatgtgcaacgttttttaactgccaaagctattaaggatgatggcacaaccgttgaacgtacgaaaggtaccccgcagggcggagtgatttccccgttattggccaacctgtatctgcatgaagcgtttgatatgtggatgaaagagcatctgcctaatgtgcagttcgaacgttatgctgatgacgtgattgcacattgtgcgaccgaaaaacaggcgcaagatgtgttggaagaaatccgcgagcggctgttgttgtacaagttagaactccatcccgagaaaacgaaaattatctatgttggctcaggtaaagatcccgagaataaaccgccgcgtaagtttacctttctgggctacgaattcaagccacgtggttatgtgaaagataaaatttggcacatgacctttaccccttcgattggagcgaaagctctcaaggccatccagattaaaatggacgaatggtcgctgcatagtcgtacattctctaaactgtcggacatctcacaggaaaaaagcgcgatcattcgtggttggatcgaatattatggtcattatcgccgcagcgaactgtacaagctggcaatccgcattgattggaaactggtccgttggctcaaacgtaagcacaaaagtctgcgtagcactgataaagcctggcaggccttacgttcagtcaaaaaaggatggccgaaactttttccccactggcacatgattccgaccccgccaactcgcgcagtctga

SEQ ID NO: 214 - DNA, 1272 bp, synthetic construct
  source 1..1272: mol_type = other DNA
atggctagcgcatggagtcatcctcaattcgaaaaatccggaatgattgattattacgaaaccaagcagcaccccgtaaccaaaaaaatggtcttggacgcgtacaagaaagtacgtgagaacaaaggttcggcgggcatggatgaacagaccctcgaggacttcaaacttaaggcaagcacgaacctgtatcaaatttggaaccgcatgacttcaggatcgtactatccgaatgccatcaaacaggttctgattccgaaaaagagcggtggtacacgtagcctgggcgtgcccaccgtgagcgatcgtatcgcgcagcaggtggtgaaaagttatcttgaagccaaagttgaagcatccttccatcaagattcctatgggtatcgccctaataaaagtgctcatcaggccttggatgtcgctaaaggccgctgctcttactatagctgggtactggacatcgatatcaaaggatttttcgataacatcgatcacgaattaatgctcaaagcattgaagcgctatacgcaggaaaaatggattctgaactacgtcgaacgttggttgaaggtcggcgtctttaatggcaatgaggtggaatcccgcgaaaaaggcactccgcagggcggcgtgattagtccattactggccaatatttttcttcactttgcttttgacatgtggatgctgaaaatctacccgcacgttccattcgaacgttattgcgacgatgtaattattcattgttcaggtaaggaacaggcgctgctgatgaaaatggcgattgcgaaacgcatgaaagagtgtaagctggagctcaacgagcagaaaacgcaaatcgtgtactgtcgcaaccagattcataaagagaagtacgaacaggtgtcgtttgacttcctggggtacacatttcggcctcgttattgcccgactaaaaaaggtctgtccctgctcttcaccccgtgcatgtctacgcattcaaaaaacgatgtgcgggaaaaaatccgcaaagttatcaatcgttcttttaaaggaagtgtacaacaacttgcacagatgctgaaccaaaaagtgcgtggttggttccagtactactgtcagtataataagtataccacggttgggctgtggtattggctgaacgcgaaagttattaattgggtcatggaaaatcggcattttggtatgcgccgtgccgttcgttggttaaaaaccatctattcgaccaacccagatatgtttattcactggcaattaagccatccgtggtga

SEQ ID NO: 215 - DNA, 1296 bp, synthetic construct
  source 1..1296: mol_type = other DNA
atggctagcgcatggagtcatcctcaattcgaaaaatccggaatgatctttaaagaacagactaaaagtgttccaatcacgaaagaaatggtctgggaatcgtataagaaagtaaaaagtaatggtggtagcgctggcattgatcaacagagcttaagtgaatttgatcgtgttcggtccaaagaactgtacaaactgtggaaccgcctggcatccggtagctatttcgccccggcaattaaacgtgttaccatcccgaaagcagggggaaaaacacgtccgctgggcatccccaccgtgtctgatcgcattgcacagcaggtggtaaaaacgtatcttgaacctcgtctggaatcggtgtttgtagacaattcttatggatatcgtccgaacaagaacgcgcacaccgccattcaatcagtgcagcaaaacgttcgtcgctacagctgggtgattgaccttgacatccaggaattcttcgagaacgtgaatcacgagttgctgctgaaggctttagagcgccacgtcagcgagaaatgggttttactgtacattaaacggtggctcgaggctcctgtcattttggaagatggtgcggttaaagtcagcacgggcaaaggcactccgcagggtggggtgatttcaccgctgctcgccaatctgtacatgcattattgcgttgataagtggctggaaaaatttcatccaagtgtgattatggtgcgctacgccgatgatctgattattcattgctcgtcttaccaggaagcggttcgtaccctgacagaccttaaagatcgcttggaaaaatgtggtttgcgtgcgcatccagagaaaaccaaaattgtctattgcaaaaaggaaggccggaaccttaatgactacccggtccagtttgattttttaggtttttcttttcaaccgatgcgcaatcgtttacgcaatggcggctcgtttctgcaattcgattgtaaaatgagccgtaaaagtaaagtccgcatcaatggggaactccgcaagctcaacttccataataagacccagcgcggcatccaggacctggcgatcctgctgaacccgaaaattcggggatgggtgcaatactatggcaaaatctcacgtcgtagcttgaaacccgtgttctattatctgcaccatcgtctcatccgctggatcctgaacaaatataagtccttcaaaggttccaaagtaaaggcggtgaagtggctgcgtcaggtaacggtgtcatatcctaacctgttttaccactgggagttagggtataaacttgtttga

SEQ ID NO: 216 - DNA, 1287 bp, synthetic construct
  source 1..1287: mol_type = other DNA
atggctagcgcatggagtcatcctcaattcgaaaaatccggaatgaccggcaagagttatgatattccgaaaactctggtgtgggaagcgtggcttcgcgttaaagcaaaccgcggcgccgcagggattgatgcggagacaattgaacgctttgaaactaaactggcggccaatctttatgaattatggaaccgtatgtctgccggcagctactttccgccgccggtaaaagcagtgccaatccctaaaaaatcaggcggggtgcgtgtgctgggggtaccgaccgtgagcgatcgcatcgctcagaccgcggtcaaaatgtggctggagccacgtctggatcctctctttcatgaagatagttacggctatcgtccgggcaagagcgctttagaagctattgccgttacgcgccgtcgttgttgggaccgcgattgggtcgtggaatttgatatcaaaggactgttcgacaatcttgatcatggactgctcatgaaagcgttgcgcaaacactgcgaagagccctggatcctgctgtatgtggaacggtggctgacggcaccgatgcagtcggccgatggtcgtgttcagacgcgtttcaaaggcaccccacaaggcggtgttgtatcgcccctcttggccaatctgtttttgcattatgcgttcgacacatgggttgcgcgccacctgccgggtgttcggtttgcgcggtatgcggatgatgctgtgttacattgcaaaagccgtcgccaagccgagtatgtgctggaccgtatccgtgagcgctttcctgcttgtaaactggagttgcatccgggtaagactcgtattgtatattgcaaagacgtcaaccgtacggaagataatcccgatattcagttcaccttcttagggtacacctttcgccctcgtcgcgccgccgataagtacggtcgcatctacgttaacttctccccagcagtctcgcgtgacgccctgaaagcgatgcgccagacgattcgcggttggcgggtgcaattgaaaaatgacaaaagtctggcggacctttccgcgatgttcggcccgattctgcgtggctggcgtcagtactacggtcgctttcacggctctgcattagaatccgtctggcgtcgtatgaaccgtgcactcatcggatggctgatgcgtaaacataagaaattagcccgccgtaagctgcgcgcggcagaaaccctggaacgcatggcgaaacggcagccgcgtgcttttgtccactggagcatgggttatctttcatctgtaggttga

SEQ ID NO: 217 - DNA, 1272 bp, synthetic construct
  source 1..1272: mol_type = other DNA
atggacggttcgaagctcaaagttaaaagtttcgaaatcccgaaacgcctggtctatgaagcgtgggaaaaagtgcgggcaaataaaggtgcccctggcgttgatgcagttagcatcaaccagttcgctgcggccgaagccgataacctgtacaagctttggaaccgtatgtcatctggtagttatatgcccggagccgtgcgcgcagttgagatccctaaagatcacgggttaggcgtccgtacgctgggtgtagccaacaccgcggatcgtgtggcccagacagccgctgcgatgctgttagaagaacgcctggaaccaatctttcatccggactcgtatggctatcgtccaggccgctcagctcacgatgcgctggctgtggcgcgcaaacgttgttggtcgcaggactgggtgattgatcttgacattcgcgcttttttcgattccgtaccgcacgacttgttactgaaagctgttgcacatcataccgaagaacgttgggtgttgctgtacattgagcgttggctgaaagcaccaatgcagatgccggacgggacactggtggcccgcgaacgcggcaccccacagggtagtcccatctctccgctgttggcgaatctttttatgcattacgcctttgaccgttggatggcgcgcgatcacccgggttgtccgtttgagcggtatgccgatgatattgtcgcacattgcgacagcaaagaacaggcctgcagcctgctggcggcgattgcggaacgtctcggggcagttggcctggagttgcatccggataaaaccaagattgtgttttgcaaggatgccaatcgtccgggtaccagcgaacacacgagctttgatttcctgggttatactttccgtggacgtctggctcccggtcctcgcggctactttgtatccttttccccggcgatgagtaccaaagccaaaaaagcggtcggccaaaaggttcgcgcgtggcatctgaatcgccgtacgggcacggatctctcaggtttagccgaggatattaacccgcacgtgcgcgggtggattaattactacggagcgttctatcgttcggagctgcacagcctcgctcgccgtatcgatgaacatcttgtccgctgggcgatgcacaagttcaaacggttgcgtggcaaaccgtctcgggcatgggactgggtggcggcagcgcgtcaacgccaacctaaactttttgcacattggcatctggtaagctccactcgtggccgtttagtcggcgcagta

SEQ ID NO: 218 - DNA, 1239 bp, synthetic construct
  source 1..1239: mol_type = other DNA
atggcgaaaagttttaatctgtctaagttcgctgtctgggatgcttacctggctgttaaagcgaataaaggtagcgcgggcattgatggacagacgatggaagatttcgaaagcgacttgaaatgtaacctttacaagatctggaaccgtctgtcgtcaggtagctatttcctgccgccggttcggcgcgttgaaattcccaaaagtaatggtacgttgcgcccacttggcattccgaccatttcggaccgtatcgcgcaaatggtgattaaaaaacgcctggagcctctggtggaaccacattttcatgatgattcctatggctaccgtcctaacaaaagcgccctggacgcaattgcacagactcgccgtcgttgttggcgcgatgactgggttttagatatggacatccagggcttttttgacgccctcgatcacaaacttgtgatgatcgcggtgtcgcgcttcacccagtgtaagtggacgatgctgtacatcgaacgttggctgaaagcagatgtcgtgatgccgaacggggaacgtgtcaaacggacccaaggtaccccgcagggcggcgtggtcagcccgttgattgccaatatctttctccatctgggttttgattcctggatgcagaaagaattcccgtgcatccattttgaacgttatgcggacgatattgtagtacattgtcgttcccagaagcaactggaatacattggacagatgattaaaagtcgcttcgcgcaatgcaaactgtctttatgccaggagaaaacaaaaatcgtatactgcaaagattcgaaacgtttagggacctactcatcacaatcttttgacttcctgggttatacattccgcccgcgctcctgccgtgataaagagggcaagttttttgtcagtttcacccccgccgtgtctcgcaaaagtatgaaagccattcggctgaaaatcaaggaacacccaatggtgaaagggtgtttttcacagggaattagcgaattggcacgtgcgattaaccctatgattcaaggttggattaattattatggccattttcgcaagagcgagatgagcactatctatgattatatcaacgagaaaatcatgaagtgggcgatgcgcaagtttaaacaccttcagcggcgtaaaaaacgtgccggccagtggctgcgcaaactgtattccaaagccccgttactcttcgctcactggcgtatttggaaatgggttgcagaa

SEQ ID NO: 219 - DNA, 1302 bp, synthetic construct
  source 1..1302: mol_type = other DNA
atgtcaaccgaattagagcgtatcagtaagcttgctggcgaaaatcggcagctcaaattcttgtcaatcgcccacctgctgacgcctgaggcgctgatggaagcgtttaaaagtctgcgcaaagatgcgtcggccggtgttgacggtgttgcgtacggtgagtatcgtatggaagctggccgccgtattcaggagttatatgaacgggtccgcggaaaacgctatcgtgcccagccgttgcgtcgcatctacattccgaaagaaggcggaaaacagcggccgatcagcatccccacagtcgcagatcgcatcgcccaaactgttgtcactatggttttagaaccagaggtggagccgcgctttcatccggactcctatggttatcgtccgggccgctccgcactggatgccgttgggaaagctcgcgaacgttgctggcgttacgactgggtaattgatcttgatatcaaagcattttttgactctctcgattgggacctggtggaacgcgctgttgcgcatcataccgagctggcgtgggtccgcctctacattgcacgttggctgcgtgccccggtgcaaaaaccagatggtaccgtagaactccgtaccaaaggcacgcctcaagggggtgtggcgtctccgctgctttccaatctgtttctgcactatgcatttgatatgtggatgcagcgttcgtttccgtcagtaccattcgaacgctatgcggatgatgcgattgtccactgtggctcggaacgtcaagcaaaaatggtcttgagtgcgattcgtgaccgctttgctgagtgcggtctggaactgcatcctaccaaaacccggatcgtgtattgccaggatagcgaccgcctgggcaagtacgagcatgtgagtttcgacttcttaggctacacgttccagccacgtcgtgctaaaaaccatcgtggaaagttcttcgtgagcttcttacccgcgattagcacaaaagccgcaaaagccattcgcgccactattcgcgaatggcgtctggccagcacgcgtaacaaccagtcgctggaagatcttgcccagctgattaacccggtggtacgcggctggatgaactattacggccggtattatcgctctaagtgtgttcaagtgctgcgccacgtgaatcttgcgttggcggcttgggcacgtcgtaagtaccgccgttttaaacgtcgtgaacgcgaatccctgcactggttaggtcgtattgcgcggcgtgatcccaatctgtttgtgttgtggcgcctcgggatccgcccggaagcagggagc

SEQ ID NO: 220 - DNA, 1245 bp, synthetic construct
  source 1..1245: mol_type = other DNA
atgaatgaagccaaaccatttgttgtcgaaaaacgcgttgtgatggaaagctggctgcaggtcaaagcaaatcgcggctctgcgggcatcgacggaatcgatttgaaatcctacgagtctaacctgcagaagaacctgtataaactttggaatcggatgagtagcggctcttacttcccgaaagcggtcaaacttgtagaaattcccaaacctaacgggggcaaacgtccgctcggtatcccaaccgtagaagatcgggttgctcagatggttgtcgtaatgtatatcgctccgcgtctggaagccatttttcacgatgatagttatggttatcgtcctatgcgtagcgcgcattcagcgatcgctaaagcaattgagcgctgcaatgaaaatttgtgggtgctggatatggacatctctaagtttttcgataccattgatcgcggtttactgatgaaggcggtgcaaaaacatgtttccgaaaaatggattctgttgtacattgaacgttggctcaaagtgccgtatcagacgagcgatggcggtgttgtagaccgtatgatgggcgttcctcaagggtcggtcattggcccggtactggccaaccttttcctgacatatgtgtttgatttgtggatgaagcattactttccgacgattccgtttgaacgttatgctgatgacaccatctgccactgccgcacggagaaacagacccaatatctgaaagcatgcctggtgaagcgtttcgccgattgtggattaaagctcaatgaggaaaaaacgaagattgtctactgtaaagacagcaaccgtaaaggcaattccgaacataccagctttgacttcttaggttatacttttcgcccgcgtaaagcaaaaaactcaaaaacagggcagattttcaccgccttttcaccagcaattagcaaaaaaagtatgatgaaaatcaaaaccgaaattcgctcgtggcatctgaaccgtcaaactcatctgagcatcgaacagatcgcggaacgtattaatcccatcgtgtcgggttggatgaactactatacgcgctttggtaaaagtgagttctggaaggtgatgtcctacctgaacgagcgtttatcgcggtgggtgaaacgcaagtataaacgtttccgcactaaactgtcgaaagcgtacgactggcttgtggagtgtgccgcgcataaccgccacatgttttcacactggatgagtggctacatcccgcactcc

SEQ ID NO: 221 - DNA, 1248 bp, synthetic construct
  source 1..1248: mol_type = other DNA
atgatccagacgaaaagtcaggacatcaccaaacgccaggtatgggaagcctataagaaagtgaaacgtaacaaaggtagcgcgggcgtggacggtgtcgattttgaaacatttgaggcgaaccttgagaacaatctctacaagctttggaatcgcctgagctcaggatcgtatatgccgcctgctgtcctgcgcgtagaaatcccgaaaagtgatggcggtgttcgtgtcctggggattccgaccattgccgaccgcgtggcccagatggttgttaaagactacctggagccgaaacttgaaaaaatttttcataacgattcctatggttaccggcctaaaaaatccgcacaccaggctctggaaacgacccgtaaacgttgttggcagtacccctttgttctggatctggatatcaaaggcttctttgataacattgaccatgagctgatgatcaaagcactggaattgcacatggataccaagtgggaaatgttatacatcaaacgttggttagtagctccggttcaaacaaaagaaggcctgcaacaacgcgagcgtggtacgccgcagggtggggtgatctctccactgctggcgaacttgttcttgcattatgcgttcgacgtctggatgcggaagaactatcctaccattccgttcgagcgctatgcagacgatgccgtgtgccattgccgcagccagcgtgaggcccaacagctgaaagccgatctgagccagcgcatggaagcgtgtaaacttgaattacacccggataaaactaaagtcgtgtactgcaaagatgacaagcgtcgtggcgaatatgaaaatgtctcattcgactttctgggctttacctttcagccccgtgtggccaaaaactcaaagacgggagagttctttgtaggctttaatccggcgattagcactaaagcggcaaaacgtattcgcctggttatgcgtcgttggaaagtgcaactgatgtcccacctctcgctcgaagaattatcggatcgcttgtctcgcgtgatccgcggctgggtgaattactattctattttcgcacggcacaaacttctggatgtgatgcgctatttcgatcgccgtttagaacgttgggcaaagcgtaagtttaaaagtctcaaacgtcgtcaagggcgcgcgcataagtggttgatgcgtattgcgcggaaagaaccaaatctgtttccacattggcagatgaaatatgctaagctgactgttcgc

SEQ ID NO: 222 - DNA, 1230 bp, synthetic construct
  source 1..1230: mol_type = other DNA
atgcatgatatttctaaagaagaaccttttcgtgcctgggaacgcgttaaaaaagcaggtgggggcgcaggctacgacgggaagaaaatccaagacgttcagctggaccttgataatcagctgtacaaaacatggaaccggttgagcagcggctcctacatggcggccccggtacttctggtcgagattccgaaagctggcggcggcaaacgcaccctgggtattccaacggtcatggatcgcgtagcacagatggttatcaaagatcgcctcgaacagatcttagagccgaagttccacaaagattcttacgcgtatcggccagacaaaagtgcgattgatgctgtgggtaaagcgcgtgagcgctgctttcaacgcaagtgggtgattgaccttgatatcaaagggtttttcgacaacattgatcactccatgatgatggagttcctgctgcaacatacgaaagacaagacgatcgtaatgtatgtgcaacgttttttaactgccaaagctattaaggatgatggcacaaccgttgaacgtacgaaaggtaccccgcagggcggagtgatttccccgttattggccaacctgtatctgcatgaagcgtttgatatgtggatgaaagagcatctgcctaatgtgcagttcgaacgttatgctgatgacgtgattgcacattgtgcgaccgaaaaacaggcgcaagatgtgttggaagaaatccgcgagcggctgttgttgtacaagttagaactccatcccgagaaaacgaaaattatctatgttggctcaggtaaagatcccgagaataaaccgccgcgtaagtttacctttctgggctacgaattcaagccacgtggttatgtgaaagataaaatttggcacatgacctttaccccttcgattggagcgaaagctctcaaggccatccagattaaaatggacgaatggtcgctgcatagtcgtacattctctaaactgtcggacatctcacaggaaaaaagcgcgatcattcgtggttggatcgaatattatggtcattatcgccgcagcgaactgtacaagctggcaatccgcattgattggaaactggtccgttggctcaaacgtaagcacaaaagtctgcgtagcactgataaagcctggcaggccttacgttcagtcaaaaaaggatggccgaaactttttccccactggcacatgattccgaccccgccaactcgcgcagtc

SEQ ID NO: 223 - DNA, 1227 bp, synthetic construct
  source 1..1227: mol_type = other DNA
atgattgattattacgaaaccaagcagcaccccgtaaccaaaaaaatggtcttggacgcgtacaagaaagtacgtgagaacaaaggttcggcgggcatggatgaacagaccctcgaggacttcaaacttaaggcaagcacgaacctgtatcaaatttggaaccgcatgacttcaggatcgtactatccgaatgccatcaaacaggttctgattccgaaaaagagcggtggtacacgtagcctgggcgtgcccaccgtgagcgatcgtatcgcgcagcaggtggtgaaaagttatcttgaagccaaagttgaagcatccttccatcaagattcctatgggtatcgccctaataaaagtgctcatcaggccttggatgtcgctaaaggccgctgctcttactatagctgggtactggacatcgatatcaaaggatttttcgataacatcgatcacgaattaatgctcaaagcattgaagcgctatacgcaggaaaaatggattctgaactacgtcgaacgttggttgaaggtcggcgtctttaatggcaatgaggtggaatcccgcgaaaaaggcactccgcagggcggcgtgattagtccattactggccaatatttttcttcactttgcttttgacatgtggatgctgaaaatctacccgcacgttccattcgaacgttattgcgacgatgtaattattcattgttcaggtaaggaacaggcgctgctgatgaaaatggcgattgcgaaacgcatgaaagagtgtaagctggagctcaacgagcagaaaacgcaaatcgtgtactgtcgcaaccagattcataaagagaagtacgaacaggtgtcgtttgacttcctggggtacacatttcggcctcgttattgcccgactaaaaaaggtctgtccctgctcttcaccccgtgcatgtctacgcattcaaaaaacgatgtgcgggaaaaaatccgcaaagttatcaatcgttcttttaaaggaagtgtacaacaacttgcacagatgctgaaccaaaaagtgcgtggttggttccagtactactgtcagtataataagtataccacggttgggctgtggtattggctgaacgcgaaagttattaattgggtcatggaaaatcggcattttggtatgcgccgtgccgttcgttggttaaaaaccatctattcgaccaacccagatatgtttattcactggcaattaagccatccgtgg

SEQ ID NO: 224 - DNA, 1251 bp, synthetic construct
  source 1..1251: mol_type = other DNA
atgatctttaaagaacagactaaaagtgttccaatcacgaaagaaatggtctgggaatcgtataagaaagtaaaaagtaatggtggtagcgctggcattgatcaacagagcttaagtgaatttgatcgtgttcggtccaaagaactgtacaaactgtggaaccgcctggcatccggtagctatttcgccccggcaattaaacgtgttaccatcccgaaagcagggggaaaaacacgtccgctgggcatccccaccgtgtctgatcgcattgcacagcaggtggtaaaaacgtatcttgaacctcgtctggaatcggtgtttgtagacaattcttatggatatcgtccgaacaagaacgcgcacaccgccattcaatcagtgcagcaaaacgttcgtcgctacagctgggtgattgaccttgacatccaggaattcttcgagaacgtgaatcacgagttgctgctgaaggctttagagcgccacgtcagcgagaaatgggttttactgtacattaaacggtggctcgaggctcctgtcattttggaagatggtgcggttaaagtcagcacgggcaaaggcactccgcagggtggggtgatttcaccgctgctcgccaatctgtacatgcattattgcgttgataagtggctggaaaaatttcatccaagtgtgattatggtgcgctacgccgatgatctgattattcattgctcgtcttaccaggaagcggttcgtaccctgacagaccttaaagatcgcttggaaaaatgtggtttgcgtgcgcatccagagaaaaccaaaattgtctattgcaaaaaggaaggccggaaccttaatgactacccggtccagtttgattttttaggtttttcttttcaaccgatgcgcaatcgtttacgcaatggcggctcgtttctgcaattcgattgtaaaatgagccgtaaaagtaaagtccgcatcaatggggaactccgcaagctcaacttccataataagacccagcgcggcatccaggacctggcgatcctgctgaacccgaaaattcggggatgggtgcaatactatggcaaaatctcacgtcgtagcttgaaacccgtgttctattatctgcaccatcgtctcatccgctggatcctgaacaaatataagtccttcaaaggttccaaagtaaaggcggtgaagtggctgcgtcaggtaacggtgtcatatcctaacctgttttaccactgggagttagggtataaacttgtt

SEQ ID NO: 225 - DNA, 1242 bp, synthetic construct
  source 1..1242: mol_type = other DNA
atgaccggcaagagttatgatattccgaaaactctggtgtgggaagcgtggcttcgcgttaaagcaaaccgcggcgccgcagggattgatgcggagacaattgaacgctttgaaactaaactggcggccaatctttatgaattatggaaccgtatgtctgccggcagctactttccgccgccggtaaaagcagtgccaatccctaaaaaatcaggcggggtgcgtgtgctgggggtaccgaccgtgagcgatcgcatcgctcagaccgcggtcaaaatgtggctggagccacgtctggatcctctctttcatgaagatagttacggctatcgtccgggcaagagcgctttagaagctattgccgttacgcgccgtcgttgttgggaccgcgattgggtcgtggaatttgatatcaaaggactgttcgacaatcttgatcatggactgctcatgaaagcgttgcgcaaacactgcgaagagccctggatcctgctgtatgtggaacggtggctgacggcaccgatgcagtcggccgatggtcgtgttcagacgcgtttcaaaggcaccccacaaggcggtgttgtatcgcccctcttggccaatctgtttttgcattatgcgttcgacacatgggttgcgcgccacctgccgggtgttcggtttgcgcggtatgcggatgatgctgtgttacattgcaaaagccgtcgccaagccgagtatgtgctggaccgtatccgtgagcgctttcctgcttgtaaactggagttgcatccgggtaagactcgtattgtatattgcaaagacgtcaaccgtacggaagataatcccgatattcagttcaccttcttagggtacacctttcgccctcgtcgcgccgccgataagtacggtcgcatctacgttaacttctccccagcagtctcgcgtgacgccctgaaagcgatgcgccagacgattcgcggttggcgggtgcaattgaaaaatgacaaaagtctggcggacctttccgcgatgttcggcccgattctgcgtggctggcgtcagtactacggtcgctttcacggctctgcattagaatccgtctggcgtcgtatgaaccgtgcactcatcggatggctgatgcgtaaacataagaaattagcccgccgtaagctgcgcgcggcagaaaccctggaacgcatggcgaaacggcagccgcgtgcttttgtccactggagcatgggttatctttcatctgtaggt

SEQ ID NO: 226 - DNA, 1521 bp, synthetic construct
  source 1..1521: mol_type = other DNA
atggctagcgcatggagtcatcctcaattcgaaaaatccggaatgatgcatggtttagagaaatcggatcttgcagtggtggccatgaagcccgcgaataacgcaggttcaccagctgcggagtgggttgaacctcgcgccggtacgaatggtaacgcagatccgccgcgcacccgtcgtacccagagccgtgactctgtttcacagggattagagcgcgtgcgccaagcggcaatgcaacggaaacgccaagcctttaccgcgctcttacaccacgtaaacgttgacgcactgcgggaagcatttttggccctgaaacgtcgcgcagccccgggcgtcgacggaatgacatggcaggattatgaaagcggcctggaagaacatcttcaagatctgcacgcccgtgtacatcgcggtacgtatcgcgctctccctgtacgccgtcggttcattccgaaaccggatggtcgtcagcgtccgttaggtattgcggccctcgaggataaaattattcagcgcgcagttgtgacagtcttgaacgccatctacgaagaagactttctggggttcagttatggcttccgtccggggcgtggccagcacgacgctctggacgccctgtgcgttgcgatcaaaggtaaacgggttaactgggttctggatgctgatattaaaggcttcttcgatgcggtggatcatagctggctgctgcgttttgtgcgccatcgcgtgggggatgaacggattacccggctggtggggaagtggctgatggcgggcgttctcgaggatggccattggagcgcgagtgaccagggcactccacaaggcgctgtcatctcgccactgctggcgaatgtagaccttcattatgtatttgatctgtgggctcagcaatggcgtcggcgcgaagtgaagggtgatatgattatcgtgcgttacgcagatgaccttgtggtcggcttcgaacacgaagccgaggcccgccgtttttgggatgccatgcgtgtccgtctggaacaattcagcctggaattgcatggtgagaaaactcgcctgttagaatttgggcgctatgcgatcgaacgtcgtcagcgctccggacagggaaaaccccagacttttaatttcctgggctttaccttcatctgtggtcgtagtcgccgtggcgcgtttttgctgcgtcgccatacccggcgtgaccgcatgcgcgcggcgttgcgtgaacttaaagacgagatgcgtcggcgccgccatgattcgctcacggatcagggtcgttggctgcgttccgtcgtcgcgggctactttgcttaccacgcagtgccaacgaatgcgcacgcgattggcgcatatcgtcatcatgtgatcgatctttggcgtcgttccttgcgccgccgttctcagaaagaccgtatgacccgcgctcgtatggatcgcctggcagccgaatggctgccgccgccgcacgtcttacatccctggccggaagatcgttttgccgttaagcaccctcgctga

SEQ ID NO: 227 - DNA, 1590 bp, synthetic construct
  source 1..1590: mol_type = other DNA
atggctagcgcatggagtcatcctcaattcgaaaaatccggaatgcagaccgcactctgggagtcggaccagcccattgtgcctaaaaaacgtgggaacgcacgtggcggtaaagagctggcgggagctcggtggacaggcggtgaaccgccgccaattccacgtgacggtcacggcgtaagtccgaaacttcggtcaattaccttgcgtgcgcgtgaagatccgacgtgcaagttcactagtctcgcgcatcttctgaccgcagattttctgacggaatgtttccgtgaactgaaaaagaacaaagcgccgggcattgatggtgttacggtgcgtgaatatgaagctaaacttgatgaaaacatttccgacctggttgcccgtcttaaagctaagcaataccgtccgcagccagtgaaacgtgtttatatccccaaacctaatggtgaacgccgcccgctgggcatccccgctattgaggataaaattgttcaaatggcgctgaaaaagattttggaagccatcttcgaagtggatttttgtgaagtgagctatggcttccgtccaaatcggtcatgccacgatgcactggatatggtcgacacaacgattatgacgcagcctgtcaattacgtcgttgacatggatattgcaaagttctttgatactgtagatcatgaatgtctcatggaatgcttacgccagcgtattgccgacccgagcctgttacgtattatcgcgcgttttttgaaatcgggcgtgatggaagacggcgtatttcaggagattgatcgtggtacgccgcaaggtggtatcctgtcccctatgctggccaatatctatctgcattacgcactggatctttggttcgagcaagaagtgaaaaaacaattatccggctttgcccagttggttcgctatgcggacgattttgtcgtctgctttcaataccgcagcgatgccgaggcctttggcgcggctctccgcgaacgtctggccaagtttgagttaaaaatcagtgaagagaaaagccgcatcattgcctttggccgtagcgcgtgccaacaggcgcgcaaacagggtaaaaaatgtgcaacatttgatttcctgggctttactctgtattgcgacaaagaccgcaacgggaactttaaagtggggcgtaagaccgcgtcaaaaaaattccggcagaaaaccaaagaaatgaaccagtggctgaaaggaacccgcaaccgcgttaaactgggcttgtggtggccgctgctgggtcgtaagctggtcggtcactatcagtactatggcatctctggaaatattaaagggctgcagtcttattaccatcacaccgtacggttggcgttcaagtggatcaaccgccgtagccagaaaaaatcctacaactggtcgcagttcaataagttcctcgcccgcaatccgttaccgaaaccgaagatctatcacttttacgctttatcgaaacgccgcggatgcgcgccggaagaaccagatgagggtaaactgcatgtgcgcttttgtgaaggggcccatagtcatcttggcgcatctacccctacccgcgggcgtctgtga

SEQ ID NO: 228 - DNA, 1389 bp, synthetic construct
  source 1..1389: mol_type = other DNA
atggctagcgcatggagtcatcctcaattcgaaaaatccggaatgcagcctgtgaaagaaacctctactggccatgtcggcagcgggaagtgctggcaaacgagtctgcgtggaatcgcaaaaaaggcaactgagaacaaaacacaccaatttggtaatctgtaccaactgctcaacaaagaaagcctgcgggaagcgttttatgatctcaagaagaaagcggccgccggcgtggacaaaatcaccgccgaagagtacgccaaagagttagaaagcaacctcggcgaacttgaagaacaactgaaatcaaaacagtaccgggcaaaacttgtacgtcgtgtctatattgataaaggaaacggtaaaaaacgtccactgggtattccggctgtgtccgataaaattacacagcgtgttgctgcgcgcatgctggaagcgatctatgaaacggagttttccgcgcattcatacgggtatcgtccccacacgggggcccagaaagcagtcaaggatcttaccaaagaattgatttgcggcaagtacggctacgttgtggaagccgatattcgttcgttttttgatgccattgaccatgactggttgattcgcatgttggaagtacgtattgcagacaaagcgttcttacgtttgatcaaaaaatggttaaaggcgggcgtacttgacaccgatggtatggtgaaacatccggttaccggttgtccacagggtggcgtaatttcgccgattctggcgaatatctatcttcactatgcgttagacctgtggtttgagaagcgtgtgcagcagagctgcgagggtatgacctatatctgtcgttatgccgatgattttgtttgtgccttccagttcaaacaagaagctgtcaagttttacaaagaattaggcgaacgcctggagaagttcgggctcgaactggcacaggaaaaaacgaatatcatcattttcagccgtttccggcaagaggataaaactaagtttgagtttctgggattcgaatttcggtggggtgtgtcgcgtaaaggcaaagcgattatcaaacgccgtaccgctccgggcaaactgcgcaaaagtattattgcttttacggaatggtgtaaaaaaatgcggtctaaacgcttacgcaaactgttcccgaaactgatcgctaaactccgcggctataccaattattacggtttgattggtaattttcgctccctgagcaagttctatgaacatgttaaacgcatcttctacaaatggctgaaccgccgttcacagcgccgcagttttaacctggcggagtttgatgcatgctgggaacgttatggggtgccgaaacctcgcatcgttgaatctgacctggtccagctgcactttgatttctga

SEQ ID NO: 229 - DNA, 1362 bp, synthetic construct
  source 1..1362: mol_type = other DNA
atggctagcgcatggagtcatcctcaattcgaaaaatccggaatgtcaggaagcccaaatcttggcagcatctcgacacgtctgcgccgtatcgcacagctggcgcgcgaagacccagaacgctcttttatgagcttagctcattatatcgatgaatactggttacaggaagcttactcgcgcactcggaaggatggggccaccggcgtggatggaacgaccggcaagcagtatggtgaacagctgggtgacaaccttcgtagcctcttagatcgctttaaaagtggccagtatcaagcgccgccggtcaaacgggtacacatccccaaaggcaccggtgatcaaacccgtccgattggtatcccgacttttgaggacaaagtcctgcaacgcgcggtggccatgctgctggaagccatctatgaagaagactttttggcttgtagttatggcttccgtcctggtcgtagcgcacatgaggcgctgcgtgatctttggcgggaactgatgggtatgggtggtggctgggtattggaagttgatattcggagtttttttgacgagctcgatcatgggcacctgcgtggcttcctggatcgccgcgtgcgcgacggggtcattcgtcgtgcaattggaaagtggttgcaagcgggcgttctggaagagggccacatgcgccatcctgtaacgggcaccccgcaaggcggcgtgatttccccgctgctggcgaatatctacctgcacgaagttgttgaccgttggtttgaagaagaggttaaaccacgtctgggtggtcgtgccgtcctgattcgctatgccgatgatcttgtaatcgctttagccgaggagaaagatgcgcgtcgtgtcgaagaagttctgccgaaacgcctggcacgtttcggcttgcagctgcatcctgacaaaacacggcttgtgcgttttcaggcaccccgtgatgaggaaaaaccgccacgttccgaaggtccgggagcttttaccttcttgggtttcacgcattattgggggaaaagtcgtaaagggaactgggtggtgaaacgcaaaacggcggccagccgttttactcgctcactctcacgcgtgcgtcagtggtgccgccgttgccggcatgagcccgtggcctggcagcagcgtcagttatctcgctctttacgtggccactacgcgtactacggtattacggggaattttcgctcgctcaccaacttccatcggcaggttacccgtgaatggcgcaagtggttgaaccgccgctcccaaaaagcacgtatgatttgggaacgcttcaatcgtctgctggtcgaatatccgctcgagcggccgcgcattttccacgcgatttga

SEQ ID NO: 230 - DNA, 1518 bp, synthetic construct
  source 1..1518: mol_type = other DNA
atggctagcgcatggagtcatcctcaattcgaaaaatccggaatgatgcatggtgacggcaagagtgatcgtccggtagtgccgggtaaaccgccgaacaaagatgggcgccgtggtccgcgtgatcatggtgtgccatacaccggcacgaaagcggaagcgccagatactgctaaaggcacgcctacggaagcaaaagcacgtgggggtccaacggcggaaggtgtagcacgccgtgatcgcaagctgcgtttcaccgccttactccatcacgtgtacgaccctgagatgttacgcgaggagtatttttgcctggaacgtgaagccgcgccgggagttgatcgtgtaacctggcgtcagtatggagaagccctggaagacaatctgcatgaccttagcgcacgtctgaaacgtggcacttatcgggcgaaacccgttcgtcgcgtctttatcccaaaagccgatggacgtcctcgtccgctgggggttaccgctctggaagacaaactggtgcagcgtgcgaccgtcgaagtgctgaacgccatctatgagactgactttcttggcttcagttacgggtttcgtcccggccgctctcagcacgacgcattggacgccctgtacactggcctgctgacaaagaaagtgaattgggtcttggaccttgacattcggggttttttcgaagcaattgatcatggctggttagtgaagtttgtcgagcaccgtattgccgatcgtcgcgtggtccgcctcattcagaaatggctcaacgcgggcgtgttagaggatggcaaacggacccgtagcgaacaagggacaccgcaaggtggttccgcatcccctttactggccaatgtatacctgcactctgtgtttgatctttgggtacagcgctggcgtcgcacgcaggcgcggggcgatgttgtagttgtgcgttatgccgacgatgcggttgtcggtttccagaatgagtcggatgcgaaacgctttcgtgcagaattggctgagcgcctgtcagaatttgctctcgaactgcacccggataaaacccgcctgatcgaattcggcccttatgcggcttcgaatcgcaaacgccgcggccagggcaagcccgaaacatttgatttcctgggcttcacgcacatttgcgggaaaaaacgcagcaacggacgctttaccgtcttacgtcagaccatccgcaaacgccttcaagcgaagctgaaacaagttaaaacgggattgcgtcggcgtctgcatgatccagttccggaagttggtcggtggctgcgttcagtggtgggcggtcatgtgcgttactatggcgtccccatgaacggtccggctctgcatctttttcgcttccaggttgggcgcttgtggtatcgtagtctgcgccgccgtagccaaaaagcgcgtttaacctgggaacgtatgcgccggctcatcgatcgctggctgccgccggcccgcgtctgtcatccgtatccgctgcgccgtttgggtgtgattacctga

SEQ ID NO: 231 - DNA, 1476 bp, synthetic construct
  source 1..1476: mol_type = other DNA
atgatgcatggtttagagaaatcggatcttgcagtggtggccatgaagcccgcgaataacgcaggttcaccagctgcggagtgggttgaacctcgcgccggtacgaatggtaacgcagatccgccgcgcacccgtcgtacccagagccgtgactctgtttcacagggattagagcgcgtgcgccaagcggcaatgcaacggaaacgccaagcctttaccgcgctcttacaccacgtaaacgttgacgcactgcgggaagcatttttggccctgaaacgtcgcgcagccccgggcgtcgacggaatgacatggcaggattatgaaagcggcctggaagaacatcttcaagatctgcacgcccgtgtacatcgcggtacgtatcgcgctctccctgtacgccgtcggttcattccgaaaccggatggtcgtcagcgtccgttaggtattgcggccctcgaggataaaattattcagcgcgcagttgtgacagtcttgaacgccatctacgaagaagactttctggggttcagttatggcttccgtccggggcgtggccagcacgacgctctggacgccctgtgcgttgcgatcaaaggtaaacgggttaactgggttctggatgctgatattaaaggcttcttcgatgcggtggatcatagctggctgctgcgttttgtgcgccatcgcgtgggggatgaacggattacccggctggtggggaagtggctgatggcgggcgttctcgaggatggccattggagcgcgagtgaccagggcactccacaaggcgctgtcatctcgccactgctggcgaatgtagaccttcattatgtatttgatctgtgggctcagcaatggcgtcggcgcgaagtgaagggtgatatgattatcgtgcgttacgcagatgaccttgtggtcggcttcgaacacgaagccgaggcccgccgtttttgggatgccatgcgtgtccgtctggaacaattcagcctggaattgcatggtgagaaaactcgcctgttagaatttgggcgctatgcgatcgaacgtcgtcagcgctccggacagggaaaaccccagacttttaatttcctgggctttaccttcatctgtggtcgtagtcgccgtggcgcgtttttgctgcgtcgccatacccggcgtgaccgcatgcgcgcggcgttgcgtgaacttaaagacgagatgcgtcggcgccgccatgattcgctcacggatcagggtcgttggctgcgttccgtcgtcgcgggctactttgcttaccacgcagtgccaacgaatgcgcacgcgattggcgcatatcgtcatcatgtgatcgatctttggcgtcgttccttgcgccgccgttctcagaaagaccgtatgacccgcgctcgtatggatcgcctggcagccgaatggctgccgccgccgcacgtcttacatccctggccggaagatcgttttgccgttaagcaccctcgc

SEQ ID NO: 232 - DNA, 1545 bp, synthetic construct
  source 1..1545: mol_type = other DNA
atgcagaccgcactctgggagtcggaccagcccattgtgcctaaaaaacgtgggaacgcacgtggcggtaaagagctggcgggagctcggtggacaggcggtgaaccgccgccaattccacgtgacggtcacggcgtaagtccgaaacttcggtcaattaccttgcgtgcgcgtgaagatccgacgtgcaagttcactagtctcgcgcatcttctgaccgcagattttctgacggaatgtttccgtgaactgaaaaagaacaaagcgccgggcattgatggtgttacggtgcgtgaatatgaagctaaacttgatgaaaacatttccgacctggttgcccgtcttaaagctaagcaataccgtccgcagccagtgaaacgtgtttatatccccaaacctaatggtgaacgccgcccgctgggcatccccgctattgaggataaaattgttcaaatggcgctgaaaaagattttggaagccatcttcgaagtggatttttgtgaagtgagctatggcttccgtccaaatcggtcatgccacgatgcactggatatggtcgacacaacgattatgacgcagcctgtcaattacgtcgttgacatggatattgcaaagttctttgatactgtagatcatgaatgtctcatggaatgcttacgccagcgtattgccgacccgagcctgttacgtattatcgcgcgttttttgaaatcgggcgtgatggaagacggcgtatttcaggagattgatcgtggtacgccgcaaggtggtatcctgtcccctatgctggccaatatctatctgcattacgcactggatctttggttcgagcaagaagtgaaaaaacaattatccggctttgcccagttggttcgctatgcggacgattttgtcgtctgctttcaataccgcagcgatgccgaggcctttggcgcggctctccgcgaacgtctggccaagtttgagttaaaaatcagtgaagagaaaagccgcatcattgcctttggccgtagcgcgtgccaacaggcgcgcaaacagggtaaaaaatgtgcaacatttgatttcctgggctttactctgtattgcgacaaagaccgcaacgggaactttaaagtggggcgtaagaccgcgtcaaaaaaattccggcagaaaaccaaagaaatgaaccagtggctgaaaggaacccgcaaccgcgttaaactgggcttgtggtggccgctgctgggtcgtaagctggtcggtcactatcagtactatggcatctctggaaatattaaagggctgcagtcttattaccatcacaccgtacggttggcgttcaagtggatcaaccgccgtagccagaaaaaatcctacaactggtcgcagttcaataagttcctcgcccgcaatccgttaccgaaaccgaagatctatcacttttacgctttatcgaaacgccgcggatgcgcgccggaagaaccagatgagggtaaactgcatgtgcgcttttgtgaaggggcccatagtcatcttggcgcatctacccctacccgcgggcgtctg

SEQ ID NO: 233 - DNA, 1344 bp, synthetic construct
  source 1..1344: mol_type = other DNA
atgcagcctgtgaaagaaacctctactggccatgtcggcagcgggaagtgctggcaaacgagtctgcgtggaatcgcaaaaaaggcaactgagaacaaaacacaccaatttggtaatctgtaccaactgctcaacaaagaaagcctgcgggaagcgttttatgatctcaagaagaaagcggccgccggcgtggacaaaatcaccgccgaagagtacgccaaagagttagaaagcaacctcggcgaacttgaagaacaactgaaatcaaaacagtaccgggcaaaacttgtacgtcgtgtctatattgataaaggaaacggtaaaaaacgtccactgggtattccggctgtgtccgataaaattacacagcgtgttgctgcgcgcatgctggaagcgatctatgaaacggagttttccgcgcattcatacgggtatcgtccccacacgggggcccagaaagcagtcaaggatcttaccaaagaattgatttgcggcaagtacggctacgttgtggaagccgatattcgttcgttttttgatgccattgaccatgactggttgattcgcatgttggaagtacgtattgcagacaaagcgttcttacgtttgatcaaaaaatggttaaaggcgggcgtacttgacaccgatggtatggtgaaacatccggttaccggttgtccacagggtggcgtaatttcgccgattctggcgaatatctatcttcactatgcgttagacctgtggtttgagaagcgtgtgcagcagagctgcgagggtatgacctatatctgtcgttatgccgatgattttgtttgtgccttccagttcaaacaagaagctgtcaagttttacaaagaattaggcgaacgcctggagaagttcgggctcgaactggcacaggaaaaaacgaatatcatcattttcagccgtttccggcaagaggataaaactaagtttgagtttctgggattcgaatttcggtggggtgtgtcgcgtaaaggcaaagcgattatcaaacgccgtaccgctccgggcaaactgcgcaaaagtattattgcttttacggaatggtgtaaaaaaatgcggtctaaacgcttacgcaaactgttcccgaaactgatcgctaaactccgcggctataccaattattacggtttgattggtaattttcgctccctgagcaagttctatgaacatgttaaacgcatcttctacaaatggctgaaccgccgttcacagcgccgcagttttaacctggcggagtttgatgcatgctgggaacgttatggggtgccgaaacctcgcatcgttgaatctgacctggtccagctgcactttgatttc

SEQ ID NO: 234 - DNA, 1317 bp, synthetic construct
  source 1..1317: mol_type = other DNA
atgtcaggaagcccaaatcttggcagcatctcgacacgtctgcgccgtatcgcacagctggcgcgcgaagacccagaacgctcttttatgagcttagctcattatatcgatgaatactggttacaggaagcttactcgcgcactcggaaggatggggccaccggcgtggatggaacgaccggcaagcagtatggtgaacagctgggtgacaaccttcgtagcctcttagatcgctttaaaagtggccagtatcaagcgccgccggtcaaacgggtacacatccccaaaggcaccggtgatcaaacccgtccgattggtatcccgacttttgaggacaaagtcctgcaacgcgcggtggccatgctgctggaagccatctatgaagaagactttttggcttgtagttatggcttccgtcctggtcgtagcgcacatgaggcgctgcgtgatctttggcgggaactgatgggtatgggtggtggctgggtattggaagttgatattcggagtttttttgacgagctcgatcatgggcacctgcgtggcttcctggatcgccgcgtgcgcgacggggtcattcgtcgtgcaattggaaagtggttgcaagcgggcgttctggaagagggccacatgcgccatcctgtaacgggcaccccgcaaggcggcgtgatttccccgctgctggcgaatatctacctgcacgaagttgttgaccgttggtttgaagaagaggttaaaccacgtctgggtggtcgtgccgtcctgattcgctatgccgatgatcttgtaatcgctttagccgaggagaaagatgcgcgtcgtgtcgaagaagttctgccgaaacgcctggcacgtttcggcttgcagctgcatcctgacaaaacacggcttgtgcgttttcaggcaccccgtgatgaggaaaaaccgccacgttccgaaggtccgggagcttttaccttcttgggtttcacgcattattgggggaaaagtcgtaaagggaactgggtggtgaaacgcaaaacggcggccagccgttttactcgctcactctcacgcgtgcgtcagtggtgccgccgttgccggcatgagcccgtggcctggcagcagcgtcagttatctcgctctttacgtggccactacgcgtactacggtattacggggaattttcgctcgctcaccaacttccatcggcaggttacccgtgaatggcgcaagtggttgaaccgccgctcccaaaaagcacgtatgatttgggaacgcttcaatcgtctgctggtcgaatatccgctcgagcggccgcgcattttccacgcgatt

SEQ ID NO: 235 - DNA, 1473 bp, synthetic construct
  source 1..1473: mol_type = other DNA
atgatgcatggtgacggcaagagtgatcgtccggtagtgccgggtaaaccgccgaacaaagatgggcgccgtggtccgcgtgatcatggtgtgccatacaccggcacgaaagcggaagcgccagatactgctaaaggcacgcctacggaagcaaaagcacgtgggggtccaacggcggaaggtgtagcacgccgtgatcgcaagctgcgtttcaccgccttactccatcacgtgtacgaccctgagatgttacgcgaggagtatttttgcctggaacgtgaagccgcgccgggagttgatcgtgtaacctggcgtcagtatggagaagccctggaagacaatctgcatgaccttagcgcacgtctgaaacgtggcacttatcgggcgaaacccgttcgtcgcgtctttatcccaaaagccgatggacgtcctcgtccgctgggggttaccgctctggaagacaaactggtgcagcgtgcgaccgtcgaagtgctgaacgccatctatgagactgactttcttggcttcagttacgggtttcgtcccggccgctctcagcacgacgcattggacgccctgtacactggcctgctgacaaagaaagtgaattgggtcttggaccttgacattcggggttttttcgaagcaattgatcatggctggttagtgaagtttgtcgagcaccgtattgccgatcgtcgcgtggtccgcctcattcagaaatggctcaacgcgggcgtgttagaggatggcaaacggacccgtagcgaacaagggacaccgcaaggtggttccgcatcccctttactggccaatgtatacctgcactctgtgtttgatctttgggtacagcgctggcgtcgcacgcaggcgcggggcgatgttgtagttgtgcgttatgccgacgatgcggttgtcggtttccagaatgagtcggatgcgaaacgctttcgtgcagaattggctgagcgcctgtcagaatttgctctcgaactgcacccggataaaacccgcctgatcgaattcggcccttatgcggcttcgaatcgcaaacgccgcggccagggcaagcccgaaacatttgatttcctgggcttcacgcacatttgcgggaaaaaacgcagcaacggacgctttaccgtcttacgtcagaccatccgcaaacgccttcaagcgaagctgaaacaagttaaaacgggattgcgtcggcgtctgcatgatccagttccggaagttggtcggtggctgcgttcagtggtgggcggtcatgtgcgttactatggcgtccccatgaacggtccggctctgcatctttttcgcttccaggttgggcgcttgtggtatcgtagtctgcgccgccgtagccaaaaagcgcgtttaacctgggaacgtatgcgccggctcatcgatcgctggctgccgccggcccgcgtctgtcatccgtatccgctgcgccgtttgggtgtgattacc

SEQ ID NO: 236 - DNA, 1368 bp, synthetic construct
  source 1..1368: mol_type = other DNA
atggctagcgcatggagtcatcctcaattcgaaaaatccggaatgaaccttagcaccccagaatccgttcagaaacttcaaacagcgctgcatacgaaagcgaaagaaagtccggattaccgcttttattgtctgtatgataaggtttatcgtgccgacgttttagcccacgcgtatcactgctgccgtgcaaatgggggtgccgcgggcgtggacggacagacttttgaatctatcgagtcagggggcttggacacctggctgggcgaattagccaaagaactgcgtgataaaaaataccgcccggaagctgtccgccgcgtttacattcctaagccgaatggctctaagcgtccgttgggtattcccacgattcgcgaccgggtggctcagatggcggcggtgttggtgttagagccgatcttcgaagctgaccttgaacccgaacagtatgcctaccgtcgtgatcgttcggcattggacgccgtgaaaaaggtgcacagcctgctgaacaccggccataaagaggtgattgatgcagatctgtccgggtacttcgacagcattccacatgctgaactgatgaaaagtctcgcgcgccggatcagcgaccgtcacgttctgcatctgattaagatgtggttggaagggccggtggaagaatccgatgaacgtgggaataaacaccgcacaactcgcaacaaagatgagggtcgtggcacccctcagggcgcgccgatctctcccttactgtcaaatctttatatgcgtcgttttgtgttaggttggaaagcgctgggtcactcgaaacgcctgcaggcgcatattgtgaactacgccgatgatttcgtgatctgttgtcggggaacagcgcaaagtgctatgcagacgatgacggatatgatggtaaaacttcgtctgactgttaatgaggcgaagacccatgtttgccgggtcccagatgagagctttgattttctgggttacaccatcggacgttgttggtcgactcgtaccggccaaccatacatcggcacgcgcccgtccaaaaaacgcatcgcgcgtgtctgcgaaaccattagtgagttaacgagccgtcgttggttgctgctggatgtcgacgagcgcgtccgccgtctcaaccgtaccctcattggttgggcaaactatttttgcctgggtccggtatcaaaagcataccgcgcagtagatgcccatgcacgttatcgtctgcgccagtggctgcgcgcgaaacataaagtacgtggcgccggcacggcccaatatccggacgaatatctgtatgcaaccctcggtctggtcgaactcgcccgccgcacccgggatttcccttgggctaaagtttga

SEQ ID NO: 237 - DNA, 1353 bp, synthetic construct
  source 1..1353: mol_type = other DNA
atggctagcgcatggagtcatcctcaattcgaaaaatccggaatgatcaaagcttccgtgggcctgcaggatcttcgccgccgcatctatgtcaaagccaaagctgaaccatcctggcgtttttggggcctctacgtgcatgtgtgtaaaatggaagccttattcttagcatacgaaatggcgaaaaagaacgacggtgcgccgggtattgacggggttacgtttgcggcaattgaagcccagggagtagcggcttttttggaacagattcaagatgaactgatcgggcgcacctacgtcccactgcccgcacggaaacaagaaattcctaaagatgggggcaaagtccgtattctgtccatccctgccatccgtgatcgcgtagtgcaaggtgccttgaaattgattcttgagcccgttttcgaagcggatttccaggcaggatcgttcggttatcgcccaaaacgtgcagcgcgtgaagcggtaagtcgtgtggcacaggctattgcgcagtataagactcgcgtgattgacctcgatctgcgcgcctatttcgataccgtgcgccacgagttattgctcaaaaaagtggcgcagcggatcaacgacaatgacgttatgcacctgttaaaagtgatgctcaaagcctcaggcaaacagggtgttccgcaaggcggtgtcatcagtccgttgctgtcaaatctttatctgaatgaagttgatcgcatgcttgagcgcgccaaagttgtaacccggagcggtcagtatacgtatgtcgaatatgcgcgttttgctgatgatatggtcattctggtggatgcgcatcgtcgtcacgattggctgatgaaagctgttgagaaacgtctgcgcgaggaattcgccaagctgcaggttgaaatcaatgaagagaagtctagcatcgttgacctgagtcgcggcgaatcttttggctttctgggctttgattttcgtcgtacccgtagtctgaaaggtgtatggcgtccgtactacgccccgaaactcaaaaagcgcacagcactgctgcaaaagctgaaagaggtctttcgctcccatcaatctcagccggtcgatcgcattgttcatctgattaacccgattctgcgcggctgggtgaattatttcgcaattgggaactcgagccagtgcttcaactacatccaggactgggtggagaagaagatccgtcgtcatcttatgcgttcacgcaaacggcgcggctttggctggcaacggtggtcgcgtcagtggttatacggcggattaggtctgtttgacggttatcgtgtgtcgcgtgcgtggagcaaagccactagcgcggaacaggtaagctga

SEQ ID NO: 238 - DNA, 1332 bp, synthetic construct
  source 1..1332: mol_type = other DNA
atggctagcgcatggagtcatcctcaattcgaaaaatccggaatgcaggaattaccgaacatcgatcgcatccgggaatttcagcgcaaacttcatgaaaaagccaaagcggatcctaagtatcgtttctattcactgtatgacaaagcatatcggatggatatcctcgaggaagcctatcgcaaagcgaaagccaatggcggtacttctggcgttgacggcgaaacgttcgatgatattgaagccaaaggtgtggctgaatacctgacggttttgcaaaaagaattaaaggaagagcaatacaacccgaaaccggtccgccgggcgtatattcccaaaccaaatggtaaaaaacgtcctctggggattcctactgtccgtgaccggatcgtgcagggcgcatttctgttgattttggaaccgatcttcgaagctgacttttgcgatagtagttttggatttcgtccagagaaaagcgctcaggatgcaattcgcgaaatctacaaatatcttaactggggttgcgaaaaaatctacgatgtggatctggaacagtattttgataccgtggagcactggaaattgatgaagctgctggcactgcgtatttctgatggaaaggtcttacatgttatcaaacaatggctcagctgtggctatgtagaagatggtcagcatcgtcaatcaaaacgcggcacaccccagggtggcgtgatttcgccgctcctggccaatgtgtatcttaatccggttgaccgcgcgtttgaacgcaatggcattggaacgatcaaacaaggttccattcatcttgttcgttatgcggatgacatggtgattctggcgcagaagaaccttgaaaaggggattacgctgttagactcctacgtggacaaactgggcttgcgtctgaacaaggagaaaacccgtcgcctggacctgccgactgataaaaaagtcaagtttctcgggttccagttccatcgggtcaccaaccgcaaaacacagaaacgcttaatcctggtatcgccgagcccaaaaagtcttaaacgctgtcgtgagaaagtgaagaccctgatcaaccactcgaacccgatggctgtacgcgagcaaattgaacgtctgaataagtacctctccggttggaccaactactttcgtctggggaacagcgcccacgcactgcaccaggtccgttactatgttaatcagcgtgtacgtcgtttaatccagcgccataaaggtcgtgagggctacggctggaaaaatattaccagcgcggatctgtacggccgcttgggtctgttctgcgattataaagttcgttggctgtga

SEQ ID NO: 239 - DNA, 1440 bp, synthetic construct
  source 1..1440: mol_type = other DNA
atggctagcgcatggagtcatcctcaattcgaaaaatccggaatgagcaaccgtttggatcaaccggcgaatgtgaacgagtcagatcacgaacgcacccgcttacgtgctcgtgacgttgttcgtgacgagggtatttcgtctcttcaggcactgcagcgtgtgctttaccgctcagccaaacaggatccaacccgtcgctttcatgctctgtacgataaacttacgcgtagtgatgtcatgtggcaggcgtggattaacgtgtctaccaaccagggggcgccgggtgcggatggtgtctccattgatgcggtaaccgcgggcggttacgagggcgtcaccagttttctggacgagctctccacggaagtcaaagcggagacatatcggcctctgccactgcgtcgcgtgcatatccctaaagccggcaaaagtggcgagacacgcccgctcggaattccgtcgctccgcgatcgtgtgctgatgagcgccgccaaactgattctggaaccgatcttcgaagcgcaattttcgagtacctctttcggattccgccccaaacgtagcgcacatgatgccttagaagttatccgtcaatcggccaattcgggggctcattgggtcctggatgctgacatcaagagttgcttcgacgaaattgatcatgaagcgttgatggcgctgattgaacgtcgtgttagcgaccgggcaatgctgaaactgttacgcagctggttacgggccggcattatcgaaggtggggtttactcagactcagattctggaacgccccagggttccccgatttcgccactgctgtgcaatattgccctgtccgtgctggatgaagcattggccaaggcaaaaagtcaaacgggctctgtcgtgcgttatgcagacgattgggtcgtactctgtgcgactaaaaaacgtgctgagacagcgcggtccattgcggaagcggccctggcgccgctggggttgcgtctgcacccagaaaaaactcgcatcgtgcaccttactcgcggtaccgaaggttttgactttctggggttccatcatcacatggttgaaagctggaagtggcctggtcgctactaccttcagcgctggccgagcgatcgtgccatggctagcatcaaagtgaaagtacgcgaaatgaccgaccgtcgctatgtgggcttatcattggatgatgtagtggatcgtctgaacccggttctccgcggctgggcaggttatttccgtcgtggcaattcttcccggaagtttaacgttattgactcgtatgttgcagagcgtatggccatcctggcgagcaataagtatggattgagcggccgcaactggggcacgcgttttagctatgaatggtttaaaagtttaggcgtatatgctctgtcaggtaaagtgatcagccgcaccgcacacgcacagtga

SEQ ID NO: 240 - DNA, 1410 bp, synthetic construct
  source 1..1410: mol_type = other DNA
atggctagcgcatggagtcatcctcaattcgaaaaatccggaatgcagcctctggatccggaagtgcactatgggatctccgaccgctgctatctggaccggcatgaagtccccatggatctgttaccagataaactgcaccagttacgttggaaattgctccaaaaggcgaagaaagaacccaagtttcgtttctacgcactgtacgaccgtgtctatcgcattgacgtgctggaagccgcgtggaaacatgtggggaaacggggcaaagcttgtggaatcgacggcgtgcgtgcagaggatatcctggagcgcgaaaacggcgtggaagactttctggcaactatcttagacgagttaaagagcaaaacctaccgcccttcgccagtgaaacgcgtgtacatcccgaaagcagatggtaaaaaacgcccactgggtattcctaccttgaaagaccgtgttgttcagatggctgtagttcttattctggaaccgatcttcgaagccgactttcacgattgcagtcatggttttcgtccggggcgtaaagcccatgatgccctggatgctattcgggaaaaccttaaagcaggtcgcacggaagtatatgatgcggatcttaaaggttattttgatactattccccatgataaacttatggcgtgtgttcgtatgcgcgttaccgatcgcagcgtgctgggcctgattcgtggctggctccgcgcaccgattatcgaagaagatgataaaggcaaccggcagccgccgctgaagtcagaacagggtactccacagggcggcgtaatctcgcctctgttggcgaacctttacctgcactggtttgataaagtctttcatcgtccggatgggcctggtacgtgggcgaatgcgcgtctggtgcgttatgcggatgattttgtcattatggctcgctaccaaagcgcccgtatcgatgagtggatttctcatcgcctcgaagactggctgggattgacgattaaccgtgagaagacaagtgtcgtgcggttaaaacgtggagaaagcttagatttcctgggctttacgttccgctacgaccgcgacctctacgggggtacgcaccgctatttgaatgttgtaccgtccaagaaaagcctgaaaaaagcccgtgatgcgattcgtgagaaaaccggcccgaaaatgtgttataaaccgaccccggccgtcgttcgtgatcttaatacatatttgaaaggatggtgcggttatttcaagtatggctacccgcgtaaaagtttccgtgacctgggtcagtactgtcgctgccgcatgaccacccatctgaatcgtcgttcccagcgcaagtatcaccgcccgaaaggcatgtcatcttatcaatatctgcaagagattggtctgctccgtccatga

SEQ ID NO: 241 - DNA, 1323 bp, synthetic construct
  source 1..1323: mol_type = other DNA
atgaaccttagcaccccagaatccgttcagaaacttcaaacagcgctgcatacgaaagcgaaagaaagtccggattaccgcttttattgtctgtatgataaggtttatcgtgccgacgttttagcccacgcgtatcactgctgccgtgcaaatgggggtgccgcgggcgtggacggacagacttttgaatctatcgagtcagggggcttggacacctggctgggcgaattagccaaagaactgcgtgataaaaaataccgcccggaagctgtccgccgcgtttacattcctaagccgaatggctctaagcgtccgttgggtattcccacgattcgcgaccgggtggctcagatggcggcggtgttggtgttagagccgatcttcgaagctgaccttgaacccgaacagtatgcctaccgtcgtgatcgttcggcattggacgccgtgaaaaaggtgcacagcctgctgaacaccggccataaagaggtgattgatgcagatctgtccgggtacttcgacagcattccacatgctgaactgatgaaaagtctcgcgcgccggatcagcgaccgtcacgttctgcatctgattaagatgtggttggaagggccggtggaagaatccgatgaacgtgggaataaacaccgcacaactcgcaacaaagatgagggtcgtggcacccctcagggcgcgccgatctctcccttactgtcaaatctttatatgcgtcgttttgtgttaggttggaaagcgctgggtcactcgaaacgcctgcaggcgcatattgtgaactacgccgatgatttcgtgatctgttgtcggggaacagcgcaaagtgctatgcagacgatgacggatatgatggtaaaacttcgtctgactgttaatgaggcgaagacccatgtttgccgggtcccagatgagagctttgattttctgggttacaccatcggacgttgttggtcgactcgtaccggccaaccatacatcggcacgcgcccgtccaaaaaacgcatcgcgcgtgtctgcgaaaccattagtgagttaacgagccgtcgttggttgctgctggatgtcgacgagcgcgtccgccgtctcaaccgtaccctcattggttgggcaaactatttttgcctgggtccggtatcaaaagcataccgcgcagtagatgcccatgcacgttatcgtctgcgccagtggctgcgcgcgaaacataaagtacgtggcgccggcacggcccaatatccggacgaatatctgtatgcaaccctcggtctggtcgaactcgcccgccgcacccgggatttcccttgggctaaagtt

SEQ ID NO: 242 - DNA, 1308 bp, synthetic construct
  source 1..1308: mol_type = other DNA
atgatcaaagcttccgtgggcctgcaggatcttcgccgccgcatctatgtcaaagccaaagctgaaccatcctggcgtttttggggcctctacgtgcatgtgtgtaaaatggaagccttattcttagcatacgaaatggcgaaaaagaacgacggtgcgccgggtattgacggggttacgtttgcggcaattgaagcccagggagtagcggcttttttggaacagattcaagatgaactgatcgggcgcacctacgtcccactgcccgcacggaaacaagaaattcctaaagatgggggcaaagtccgtattctgtccatccctgccatccgtgatcgcgtagtgcaaggtgccttgaaattgattcttgagcccgttttcgaagcggatttccaggcaggatcgttcggttatcgcccaaaacgtgcagcgcgtgaagcggtaagtcgtgtggcacaggctattgcgcagtataagactcgcgtgattgacctcgatctgcgcgcctatttcgataccgtgcgccacgagttattgctcaaaaaagtggcgcagcggatcaacgacaatgacgttatgcacctgttaaaagtgatgctcaaagcctcaggcaaacagggtgttccgcaaggcggtgtcatcagtccgttgctgtcaaatctttatctgaatgaagttgatcgcatgcttgagcgcgccaaagttgtaacccggagcggtcagtatacgtatgtcgaatatgcgcgttttgctgatgatatggtcattctggtggatgcgcatcgtcgtcacgattggctgatgaaagctgttgagaaacgtctgcgcgaggaattcgccaagctgcaggttgaaatcaatgaagagaagtctagcatcgttgacctgagtcgcggcgaatcttttggctttctgggctttgattttcgtcgtacccgtagtctgaaaggtgtatggcgtccgtactacgccccgaaactcaaaaagcgcacagcactgctgcaaaagctgaaagaggtctttcgctcccatcaatctcagccggtcgatcgcattgttcatctgattaacccgattctgcgcggctgggtgaattatttcgcaattgggaactcgagccagtgcttcaactacatccaggactgggtggagaagaagatccgtcgtcatcttatgcgttcacgcaaacggcgcggctttggctggcaacggtggtcgcgtcagtggttatacggcggattaggtctgtttgacggttatcgtgtgtcgcgtgcgtggagcaaagccactagcgcggaacaggtaagc

SEQ ID NO: 243 - DNA, 1287 bp, synthetic construct
  source 1..1287: mol_type = other DNA
atgcaggaattaccgaacatcgatcgcatccgggaatttcagcgcaaacttcatgaaaaagccaaagcggatcctaagtatcgtttctattcactgtatgacaaagcatatcggatggatatcctcgaggaagcctatcgcaaagcgaaagccaatggcggtacttctggcgttgacggcgaaacgttcgatgatattgaagccaaaggtgtggctgaatacctgacggttttgcaaaaagaattaaaggaagagcaatacaacccgaaaccggtccgccgggcgtatattcccaaaccaaatggtaaaaaacgtcctctggggattcctactgtccgtgaccggatcgtgcagggcgcatttctgttgattttggaaccgatcttcgaagctgacttttgcgatagtagttttggatttcgtccagagaaaagcgctcaggatgcaattcgcgaaatctacaaatatcttaactggggttgcgaaaaaatctacgatgtggatctggaacagtattttgataccgtggagcactggaaattgatgaagctgctggcactgcgtatttctgatggaaaggtcttacatgttatcaaacaatggctcagctgtggctatgtagaagatggtcagcatcgtcaatcaaaacgcggcacaccccagggtggcgtgatttcgccgctcctggccaatgtgtatcttaatccggttgaccgcgcgtttgaacgcaatggcattggaacgatcaaacaaggttccattcatcttgttcgttatgcggatgacatggtgattctggcgcagaagaaccttgaaaaggggattacgctgttagactcctacgtggacaaactgggcttgcgtctgaacaaggagaaaacccgtcgcctggacctgccgactgataaaaaagtcaagtttctcgggttccagttccatcgggtcaccaaccgcaaaacacagaaacgcttaatcctggtatcgccgagcccaaaaagtcttaaacgctgtcgtgagaaagtgaagaccctgatcaaccactcgaacccgatggctgtacgcgagcaaattgaacgtctgaataagtacctctccggttggaccaactactttcgtctggggaacagcgcccacgcactgcaccaggtccgttactatgttaatcagcgtgtacgtcgtttaatccagcgccataaaggtcgtgagggctacggctggaaaaatattaccagcgcggatctgtacggccgcttgggtctgttctgcgattataaagttcgttggctg

SEQ ID NO: 244 - DNA, 1395 bp, synthetic construct
  source 1..1395: mol_type = other DNA
atgagcaaccgtttggatcaaccggcgaatgtgaacgagtcagatcacgaacgcacccgcttacgtgctcgtgacgttgttcgtgacgagggtatttcgtctcttcaggcactgcagcgtgtgctttaccgctcagccaaacaggatccaacccgtcgctttcatgctctgtacgataaacttacgcgtagtgatgtcatgtggcaggcgtggattaacgtgtctaccaaccagggggcgccgggtgcggatggtgtctccattgatgcggtaaccgcgggcggttacgagggcgtcaccagttttctggacgagctctccacggaagtcaaagcggagacatatcggcctctgccactgcgtcgcgtgcatatccctaaagccggcaaaagtggcgagacacgcccgctcggaattccgtcgctccgcgatcgtgtgctgatgagcgccgccaaactgattctggaaccgatcttcgaagcgcaattttcgagtacctctttcggattccgccccaaacgtagcgcacatgatgccttagaagttatccgtcaatcggccaattcgggggctcattgggtcctggatgctgacatcaagagttgcttcgacgaaattgatcatgaagcgttgatggcgctgattgaacgtcgtgttagcgaccgggcaatgctgaaactgttacgcagctggttacgggccggcattatcgaaggtggggtttactcagactcagattctggaacgccccagggttccccgatttcgccactgctgtgcaatattgccctgtccgtgctggatgaagcattggccaaggcaaaaagtcaaacgggctctgtcgtgcgttatgcagacgattgggtcgtactctgtgcgactaaaaaacgtgctgagacagcgcggtccattgcggaagcggccctggcgccgctggggttgcgtctgcacccagaaaaaactcgcatcgtgcaccttactcgcggtaccgaaggttttgactttctggggttccatcatcacatggttgaaagctggaagtggcctggtcgctactaccttcagcgctggccgagcgatcgtgccatggctagcatcaaagtgaaagtacgcgaaatgaccgaccgtcgctatgtgggcttatcattggatgatgtagtggatcgtctgaacccggttctccgcggctgggcaggttatttccgtcgtggcaattcttcccggaagtttaacgttattgactcgtatgttgcagagcgtatggccatcctggcgagcaataagtatggattgagcggccgcaactggggcacgcgttttagctatgaatggtttaaaagtttaggcgtatatgctctgtcaggtaaagtgatcagccgcaccgcacacgcacag

SEQ ID NO: 245 - DNA, 1365 bp, synthetic construct
  source 1..1365: mol_type = other DNA
atgcagcctctggatccggaagtgcactatgggatctccgaccgctgctatctggaccggcatgaagtccccatggatctgttaccagataaactgcaccagttacgttggaaattgctccaaaaggcgaagaaagaacccaagtttcgtttctacgcactgtacgaccgtgtctatcgcattgacgtgctggaagccgcgtggaaacatgtggggaaacggggcaaagcttgtggaatcgacggcgtgcgtgcagaggatatcctggagcgcgaaaacggcgtggaagactttctggcaactatcttagacgagttaaagagcaaaacctaccgcccttcgccagtgaaacgcgtgtacatcccgaaagcagatggtaaaaaacgcccactgggtattcctaccttgaaagaccgtgttgttcagatggctgtagttcttattctggaaccgatcttcgaagccgactttcacgattgcagtcatggttttcgtccggggcgtaaagcccatgatgccctggatgctattcgggaaaaccttaaagcaggtcgcacggaagtatatgatgcggatcttaaaggttattttgatactattccccatgataaacttatggcgtgtgttcgtatgcgcgttaccgatcgcagcgtgctgggcctgattcgtggctggctccgcgcaccgattatcgaagaagatgataaaggcaaccggcagccgccgctgaagtcagaacagggtactccacagggcggcgtaatctcgcctctgttggcgaacctttacctgcactggtttgataaagtctttcatcgtccggatgggcctggtacgtgggcgaatgcgcgtctggtgcgttatgcggatgattttgtcattatggctcgctaccaaagcgcccgtatcgatgagtggatttctcatcgcctcgaagactggctgggattgacgattaaccgtgagaagacaagtgtcgtgcggttaaaacgtggagaaagcttagatttcctgggctttacgttccgctacgaccgcgacctctacgggggtacgcaccgctatttgaatgttgtaccgtccaagaaaagcctgaaaaaagcccgtgatgcgattcgtgagaaaaccggcccgaaaatgtgttataaaccgaccccggccgtcgttcgtgatcttaatacatatttgaaaggatggtgcggttatttcaagtatggctacccgcgtaaaagtttccgtgacctgggtcagtactgtcgctgccgcatgaccacccatctgaatcgtcgttcccagcgcaagtatcaccgcccgaaaggcatgtcatcttatcaatatctgcaagagattggtctgctccgtcca

SEQ ID NO: 246 - DNA, 1746 bp, synthetic construct
  source 1..1746: mol_type = other DNA
atggctagcgcatggagtcatcctcaattcgaaaaatccggaatgaacaccccgacggaatggtgtcgtatgcaagtatcagaattacagcgtcgcttggcgcgtaaagccaccgataaaccggaacatcgttttaccaaactttatgacctgttaacctgggagccactcatggcgtgggcgtttgacaaactcatgaccaatgcgggtagccgtacggccggcattgatcgtatggacaaacgtaaagcgctccataatcgggaccttatcattgcggaactgcgtgttgctttgaaatccgggacctacaaacaccaaccggttcgtcgtgtgttcattcccaaggctaatggcaaacgtcgccctttaggcatccccactctgacggatcgcatggttcagatgatggtgaaggccattctcgaaccgatctttgaaagtgattttcgcccggaatcgcatggctttcgtccacagcgtagttgccacactgcattagcccatctgcatcaattaaccgcaccacgccagaaaaagatgaactgggtgatcgagggtgacattacgggttgctttgatcatattcagcataccacactgacccgtctgttgcggcgccgcctgcaggatcataaactgatgggcattatttggcagatgctgcaggcaggtgtcatggaaggtacgctgttcaccacgacatccgaaggtactcctcagggtggaattgtatcaccgcttctggcaaacatctatctgcacgagttggatctttggttccaccagaattataccggcttgaactataacgaaaagaaccggcgccggaagcgcaaagaggggaacgcgttttacgttcgctacgcggatgatttcgtggtggcttggaatggtacgcgcgaaggagccgaacagttgaaagcagccctcaccaccttcctgcgtgagcatctgggtttagagctgtcagcagagaaaacccgtattacgcatgtcactgacggatacgatttcctggggtttactgtaaaacgctatcgtaatcgcagcggcggatctacgctgatcacccgcccatctgaaaaaagcgtgatgaaactgaaagtcaaaatcaagaccatgacaaaacacggtacaacccgtgacgccgtgcgtgacaaaatcacagctatgaattacctgacccggggctgggctaactactttcgtcatagcgcggcttctggcacgctgcgttatgtgagccattacgcctttaagcgcgtcgaaatttggctccgcgcgaaaacccgtcaggggagcaaggcgatctatggctcgtactatcggcgtgatccgcacggccaccttacttggtccgccggcggtcaacacctgcatctgcctacgtatacgaaaattgaacgcttgcgctatgcgcatcgtccgaatccctatctgacggaaccggaagtatcgcctctgacgcacaacgaagccccgttcggcactaaagagtggggcggggcgcactactatggggaaggctggactgaaatccgcgcagcggtgctggaacgtgatgaacgcacttgtcgtacctgtgggaaaaagggcaaagttgaggttcatcacatccgcccgtggaaaccaggtatggcacatgaacttaccaacctgattaccctgtgcggtacatgccaccgccaagtccgtgatccgaaaagtgaggtcaatcgccaattagcccgtatgacaccgtga

SEQ ID NO: 247 - DNA, 1599 bp, synthetic construct
  source 1..1599: mol_type = other DNA
atggctagcgcatggagtcatcctcaattcgaaaaatccggaatggatatggatcgtcaggctgatgaagcttggattctcagcgtccaatccaaactttatcaatggtcgcaggccaacccgggtgatcagtggcgcgatatgtggagttggttaactgacattcgcacattacgctgtgcgtggcaacgtgcggcgtcaaaccgtggcgcgcgcacggcaggagtggatggcatgacggtcggccatatccgtgcaaacaagggcgaacagcgttttctcgagaaactgcaggccgagttgcgtagcggagcataccgtccatcaccgagccgccgtatcctgattccgaaagcgggtaaaccaggtcaatttcgtccgctgggtattccgactattaaagaccgcgtggcgcagggcgccgttaagcttttactggaacccatctttgaagcccagttctggcatgtaagttatggttttcggcctgggcggtcatcgcacggcgcattggagtacctgcgccgtgccgcgttgccccagaaacgcgaccaagacaaccgtcgctctcgcctgccgtatccgtgggtcatcgagggagacattaaagggtgctttgatcatatttctcaccaccaccttatgaatcgtttgcgggcgcgcgtgggtgatcatcgcgttacccgtctggtggtgctcttcctgaaagccggtgtcctggcagaggaccagttcctgcgtacagataatgggaccccacaaggcggaattatttccccgctgttgagcaacatcgttctgagcgcgatcgaagaacgttatgagcgctgggcgtatcatcgcaccaaactgtaccctcatcgtaaacgtgatggtgtggctgctgcggcgagcgcacggggtgcggatcgtaaagccggccgctgtgtctttttaccggttcgttatgctgacgactttatcttgttagtagctgggaccaaggaagacgcactggcggaaaaatctgcattggctgattaccttctggaaaccacgggcttagaacttagcccagaaaaaaccaaggtgaccgccctgactgatggctttgaattcctcgggttccgttttggcgcccactggaataagtgctacggctttggcacacgtgttgaagtgccgaaagcgaaagcagcggatctgcgttatcgcgtgaaacagctcacgcgccgtaataccacccttgtatccctgggggagaaactgaaagaaatcaatccaattctgcgtggatgggccaactattatcgctactgtgcctatgctggtgatgtgttcaccagcctggattggtatgttggtgaccgcatctggcattggctgcgctacaaacggccgaaggcctcggcacacgaaattctcgcgtcgcgccgcccttcacagctgcgtcgtactcgtaaagtttggcaggatggtagtacggagcaattcctgctgtccctgacgccggtatgccgttaccggctggcatggttaggcaaacccaacttcgccatgtctagtggtgaacctgatgccgaacggaaaagtcaggtccgttttggcaagcgccgctga

SEQ ID NO: 248 - DNA, 1605 bp, synthetic construct
  source 1..1605: mol_type = other DNA
atggctagcgcatggagtcatcctcaattcgaaaaatccggaatgacaccgaacggcgtgacgccatggccttcgctcgaggaagctcgcacgcgtgtgctgggaattcagcgcaaactgcatcgctggaccaaggacgacgcgaagcgcttcgatgacctgtttaatctgaccttcgaccgtgcaacccttctggtcgcctggtcgcgcgttcgcgggaaccgtggatctggaacggcgggtgtggacggggtcacccgttggcatatcgaacatcgcattggtgtggagcggttcctcgaggagctgcgcgaagcgctgaaagtccgcagttaccgtccacaggctgtgcgtgaacggggcattccgaaaccccagggtaaagtacggtatcttgggatccctaccattcgggatcgcgttgtgcagatggctttaaaactcgtgctcgagccgatttttgaagcggatttctgtcccacctcatatgggtatcgtcctgcacggcgtgcgcaggatgccatcgcggaaattgcacactttattaatccgccatccacttatgaatacgtgattgaaggtgatatccgtgcatgctttgataatgtgaaccaaggcatcctgatgcgcttagtgcgggaacgcattgcggaccgcaaagtgttggccttggtcaatgcgtttttacgtgccggtatgatgaaagagactggcggttttcgtgcgaccctgaccggcactccgcaaggcggcatcctgagcccgattctggccaatgtgtacctttctgtcctggatcgccacttcgagcgtgcctggaaatatcagacacgctatatcgagtgtactacctattaccgtcgtcgtggtctggcaacctatcgtctggtacgctatgcggatgacttcgttatcctggtgcgcggcagccgcgaacaggcggaagcgatccgcgaagaggtagcacgtctgttgtgggatgaattacagatggaactgtcagccgaaaaaacgtgtatcacgcacgtcgatgccggctttgattttttgggccatcgtattcgtcgcgttcagtggcgtggtaaaagtgtcgctgtcacctacccgtccaaaaaaagcctggaagcggttaaacgtgaagtaaaaagtctgaccacatgctggacacggaacctttctctccgtgttttgctcattcggctgaacccggttttgcgcggttggtccacgtacttccgctacgatgcgagcaagcgtactcttgcatacgtagaccattttgcctggtggcgcgttttccgttggctgcgtaagaaacacccgcagcgcagcgtgaagtatcttcgtcgtcgttatacgggcggccgctggcagatccaagaagaagatgttgaactgtttcgtccgagccgcgtgcgtgtcgaacgttatcgctatcgtggccgccgtattttagttccatggatggagccggaagaactgggccgtgttggtcgttacggttcatacgactttgatgaatgcgctttgctggaacgcttacaagaggctctggcatcggccgagcaaacgaccgtattatgcggggaacccgatgcccggtga

SEQ ID NO: 249 - DNA, 1518 bp, synthetic construct
  source 1..1518: mol_type = other DNA
atggctagcgcatggagtcatcctcaattcgaaaaatccggaatggatggcgataccagcgtcaatacgggtgtggtcgcgtggcccgaggatgacgccgcctggctgtcggtacgccggatgcagctcaaactgcatcgttgggcaagcgaagattccgcgcgtcgtttcggcgatctgtttaatcttgtgtatgaccccgcattcctggtacatgcttttgaacgtgtcgctggaaatgatggagcccgcaccgccggggtcgatggcgtgaccgtggcacaaatcgagacacgtgttggtgtgggcgtgtttttaggccaggtgcgcgatagcttaaaatcaggtgagtaccgcccgtcaccggtacgtcaggttaaaattccgaaagggggtggtaaacttcgtagtttaggtattccgacggtcgtggatcgtgtagttcaagcggcgtgcaaagctgttctggaaccggtgtttgaagctgattttttgccatgctcgtatgggtttcgtcctaaccgccgtgcgcaggacgcaatcgcggagattcatcatttcacctctcggcctgcggactaccaatatgttagcgaagcagatattgcggcttgcttcgacgaaatcgatcatgtggcagtgatggaccgcgttcggcgccgtattggagacaagcgtctgtgtgccctggtgaaagcattcctcaaagcaggtgtactgaacgatcttggcgatcgtgaagagtcactgactggtacaccgcagggcggtatcctgtccccgctcctggccaatatcgctctcagcgctttggatgaacactttacccgccagtgggacaccgataccggtatgctggggtcgccggcgcgtcgcgcaaaacgtaagcgtgatggcctgggcaattggcgtctggttcgctatgcggacgacttcgtcttactggttagtggggatcgtcaccacgccgaagccctgcgcgaagaagtcagcgcggttcttactccattaggtctgcgcctcgcaccagagaagacctcagtagtccacatcgatgaaggctttgattttctgggttttcacatccgtcgcatgcgcaagcgtggtaccaataaacattacgtgtacacgacgccgtctcgcaagagtgtccagaaaattcgcgatcgcgttcgcaacaaaacctatcgcagtacattaaacatggaccttgacgaactgattgcgggcctgaaccgctctatgcgtggctgggccaactacttccgtcatggggtgagcaaagctacttttaatactgtcgacaaccatgcgtggttgcgtttggttggctggattcgccgtaaacatcgtaacacgtcccgcaaacagttgcggcgtcggttctgtgatcaaggatggcggattgcccacaatggagtagtgtttacgggcgcctcttcggtggcggttacccgttatcgctatcgtggcgcgaacatcccaacaccttggacgcaggccgcgacttccagctga

SEQ ID NO: 250 - DNA, 1473 bp, synthetic construct
  source 1..1473: mol_type = other DNA
atggctagcgcatggagtcatcctcaattcgaaaaatccggaatgaacaccgatgaaagcgaacacgcactgtatgaagccgagcgccgcgtgttagagatccagaccaaacttcatcggtgggcccgcgaagattcgcatcggcgttttgatgatcttttcaatcttgtcgctgatccggcgtttttgttggttgcgtgggctcgtgttcgtggcaataagggtgcgcgttctgctggagttgatggagaaacggcatactacgtggaagcagtccgtggcgtggaagtctttctggatcgcttgcgtacatccttaaaagatcgctcattttgtccgttacccgttcgcgagcgtatgatcccgaaagcgggtggcaaacttcgtcggctcggaattgccacggtaacggaccgtgtggtgcaggcgtccctgaaactggtgctggaacctattttcgaggcggacttcttaccgtgctcttacggatttcgtccgaaacaccgtgcccatgatgcggtagcagaagttcgtcacttcaccagtcatagctacgagtggattgtggaaggcgacattaaagcatgttttgacgaaattagccatcttgctctcttggaccgtgtgcgggcgcgtattggggacaaacgtgtgctggccctggtgaaagcattcctgaagagcggtatcttgggtgaagatcgtgttttgcgcgagaatgacgcaggtacgccgcaggggagcattttgtctccactcctgtcgaacgtcgcgctgtcggtcctcgatgaatatattgccaaaggcccgggcgggcccggttcaactttcaatgatcgcatcaagcgtcgtcggcgtggcctgccgaactaccgcctggcccgctatgccgatgactggtgcctgatgatccacggcatccgtgccgatgcggaagtactgcgcgaagaaatcgccggggtgttagctccaatgggcctgcgtttaagtgaggaaaaaactctgatcacccatatcgatgaaggcttagactttcttggttggcgtatccaacgccatcgcaaacgtgggtccaaccgctactatgtctatacatatccggcacgcaaggccctggctgcggtaaccgataaagtaaaagcgcaatgccgtaaaaccggcactgacctgcctctggatgctctgctgatttgtctgaaccgcatgctgcgcggctggtgtgcatattttcgcccaggtgtctcgtcaacagcgtttcagtacctgagcagctatacctgggggcgcgttattcactggctgcgccgcaaacatccccacatgaactggaaagagctccgtcggcgtttttgcggcggcggttggtggccggcgtccgaagagcgcgaactcttcaatcctgcgaaggttggtacgacccgttatcgctatcgtggtagtgtgattcctagtccgtggccaattaccggttga

SEQ ID NO: 251 - DNA, 1701 bp, synthetic construct
  source 1..1701: mol_type = other DNA
atgaacaccccgacggaatggtgtcgtatgcaagtatcagaattacagcgtcgcttggcgcgtaaagccaccgataaaccggaacatcgttttaccaaactttatgacctgttaacctgggagccactcatggcgtgggcgtttgacaaactcatgaccaatgcgggtagccgtacggccggcattgatcgtatggacaaacgtaaagcgctccataatcgggaccttatcattgcggaactgcgtgttgctttgaaatccgggacctacaaacaccaaccggttcgtcgtgtgttcattcccaaggctaatggcaaacgtcgccctttaggcatccccactctgacggatcgcatggttcagatgatggtgaaggccattctcgaaccgatctttgaaagtgattttcgcccggaatcgcatggctttcgtccacagcgtagttgccacactgcattagcccatctgcatcaattaaccgcaccacgccagaaaaagatgaactgggtgatcgagggtgacattacgggttgctttgatcatattcagcataccacactgacccgtctgttgcggcgccgcctgcaggatcataaactgatgggcattatttggcagatgctgcaggcaggtgtcatggaaggtacgctgttcaccacgacatccgaaggtactcctcagggtggaattgtatcaccgcttctggcaaacatctatctgcacgagttggatctttggttccaccagaattataccggcttgaactataacgaaaagaaccggcgccggaagcgcaaagaggggaacgcgttttacgttcgctacgcggatgatttcgtggtggcttggaatggtacgcgcgaaggagccgaacagttgaaagcagccctcaccaccttcctgcgtgagcatctgggtttagagctgtcagcagagaaaacccgtattacgcatgtcactgacggatacgatttcctggggtttactgtaaaacgctatcgtaatcgcagcggcggatctacgctgatcacccgcccatctgaaaaaagcgtgatgaaactgaaagtcaaaatcaagaccatgacaaaacacggtacaacccgtgacgccgtgcgtgacaaaatcacagctatgaattacctgacccggggctgggctaactactttcgtcatagcgcggcttctggcacgctgcgttatgtgagccattacgcctttaagcgcgtcgaaatttggctccgcgcgaaaacccgtcaggggagcaaggcgatctatggctcgtactatcggcgtgatccgcacggccaccttacttggtccgccggcggtcaacacctgcatctgcctacgtatacgaaaattgaacgcttgcgctatgcgcatcgtccgaatccctatctgacggaaccggaagtatcgcctctgacgcacaacgaagccccgttcggcactaaagagtggggcggggcgcactactatggggaaggctggactgaaatccgcgcagcggtgctggaacgtgatgaacgcacttgtcgtacctgtgggaaaaagggcaaagttgaggttcatcacatccgcccgtggaaaccaggtatggcacatgaacttaccaacctgattaccctgtgcggtacatgccaccgccaagtccgtgatccgaaaagtgaggtcaatcgccaattagcccgtatgacaccg

SEQ ID NO: 252 - DNA, 1554 bp, synthetic construct
  source 1..1554: mol_type = other DNA
atggatatggatcgtcaggctgatgaagcttggattctcagcgtccaatccaaactttatcaatggtcgcaggccaacccgggtgatcagtggcgcgatatgtggagttggttaactgacattcgcacattacgctgtgcgtggcaacgtgcggcgtcaaaccgtggcgcgcgcacggcaggagtggatggcatgacggtcggccatatccgtgcaaacaagggcgaacagcgttttctcgagaaactgcaggccgagttgcgtagcggagcataccgtccatcaccgagccgccgtatcctgattccgaaagcgggtaaaccaggtcaatttcgtccgctgggtattccgactattaaagaccgcgtggcgcagggcgccgttaagcttttactggaacccatctttgaagcccagttctggcatgtaagttatggttttcggcctgggcggtcatcgcacggcgcattggagtacctgcgccgtgccgcgttgccccagaaacgcgaccaagacaaccgtcgctctcgcctgccgtatccgtgggtcatcgagggagacattaaagggtgctttgatcatatttctcaccaccaccttatgaatcgtttgcgggcgcgcgtgggtgatcatcgcgttacccgtctggtggtgctcttcctgaaagccggtgtcctggcagaggaccagttcctgcgtacagataatgggaccccacaaggcggaattatttccccgctgttgagcaacatcgttctgagcgcgatcgaagaacgttatgagcgctgggcgtatcatcgcaccaaactgtaccctcatcgtaaacgtgatggtgtggctgctgcggcgagcgcacggggtgcggatcgtaaagccggccgctgtgtctttttaccggttcgttatgctgacgactttatcttgttagtagctgggaccaaggaagacgcactggcggaaaaatctgcattggctgattaccttctggaaaccacgggcttagaacttagcccagaaaaaaccaaggtgaccgccctgactgatggctttgaattcctcgggttccgttttggcgcccactggaataagtgctacggctttggcacacgtgttgaagtgccgaaagcgaaagcagcggatctgcgttatcgcgtgaaacagctcacgcgccgtaataccacccttgtatccctgggggagaaactgaaagaaatcaatccaattctgcgtggatgggccaactattatcgctactgtgcctatgctggtgatgtgttcaccagcctggattggtatgttggtgaccgcatctggcattggctgcgctacaaacggccgaaggcctcggcacacgaaattctcgcgtcgcgccgcccttcacagctgcgtcgtactcgtaaagtttggcaggatggtagtacggagcaattcctgctgtccctgacgccggtatgccgttaccggctggcatggttaggcaaacccaacttcgccatgtctagtggtgaacctgatgccgaacggaaaagtcaggtccgttttggcaagcgccgc

SEQ ID NO: 253 - DNA, 1560 bp, synthetic construct
  source 1..1560: mol_type = other DNA
atgacaccgaacggcgtgacgccatggccttcgctcgaggaagctcgcacgcgtgtgctgggaattcagcgcaaactgcatcgctggaccaaggacgacgcgaagcgcttcgatgacctgtttaatctgaccttcgaccgtgcaacccttctggtcgcctggtcgcgcgttcgcgggaaccgtggatctggaacggcgggtgtggacggggtcacccgttggcatatcgaacatcgcattggtgtggagcggttcctcgaggagctgcgcgaagcgctgaaagtccgcagttaccgtccacaggctgtgcgtgaacggggcattccgaaaccccagggtaaagtacggtatcttgggatccctaccattcgggatcgcgttgtgcagatggctttaaaactcgtgctcgagccgatttttgaagcggatttctgtcccacctcatatgggtatcgtcctgcacggcgtgcgcaggatgccatcgcggaaattgcacactttattaatccgccatccacttatgaatacgtgattgaaggtgatatccgtgcatgctttgataatgtgaaccaaggcatcctgatgcgcttagtgcgggaacgcattgcggaccgcaaagtgttggccttggtcaatgcgtttttacgtgccggtatgatgaaagagactggcggttttcgtgcgaccctgaccggcactccgcaaggcggcatcctgagcccgattctggccaatgtgtacctttctgtcctggatcgccacttcgagcgtgcctggaaatatcagacacgctatatcgagtgtactacctattaccgtcgtcgtggtctggcaacctatcgtctggtacgctatgcggatgacttcgttatcctggtgcgcggcagccgcgaacaggcggaagcgatccgcgaagaggtagcacgtctgttgtgggatgaattacagatggaactgtcagccgaaaaaacgtgtatcacgcacgtcgatgccggctttgattttttgggccatcgtattcgtcgcgttcagtggcgtggtaaaagtgtcgctgtcacctacccgtccaaaaaaagcctggaagcggttaaacgtgaagtaaaaagtctgaccacatgctggacacggaacctttctctccgtgttttgctcattcggctgaacccggttttgcgcggttggtccacgtacttccgctacgatgcgagcaagcgtactcttgcatacgtagaccattttgcctggtggcgcgttttccgttggctgcgtaagaaacacccgcagcgcagcgtgaagtatcttcgtcgtcgttatacgggcggccgctggcagatccaagaagaagatgttgaactgtttcgtccgagccgcgtgcgtgtcgaacgttatcgctatcgtggccgccgtattttagttccatggatggagccggaagaactgggccgtgttggtcgttacggttcatacgactttgatgaatgcgctttgctggaacgcttacaagaggctctggcatcggccgagcaaacgaccgtattatgcggggaacccgatgcccgg

SEQ ID NO: 254 - DNA, 1473 bp, synthetic construct
  source 1..1473: mol_type = other DNA
atggatggcgataccagcgtcaatacgggtgtggtcgcgtggcccgaggatgacgccgcctggctgtcggtacgccggatgcagctcaaactgcatcgttgggcaagcgaagattccgcgcgtcgtttcggcgatctgtttaatcttgtgtatgaccccgcattcctggtacatgcttttgaacgtgtcgctggaaatgatggagcccgcaccgccggggtcgatggcgtgaccgtggcacaaatcgagacacgtgttggtgtgggcgtgtttttaggccaggtgcgcgatagcttaaaatcaggtgagtaccgcccgtcaccggtacgtcaggttaaaattccgaaagggggtggtaaacttcgtagtttaggtattccgacggtcgtggatcgtgtagttcaagcggcgtgcaaagctgttctggaaccggtgtttgaagctgattttttgccatgctcgtatgggtttcgtcctaaccgccgtgcgcaggacgcaatcgcggagattcatcatttcacctctcggcctgcggactaccaatatgttagcgaagcagatattgcggcttgcttcgacgaaatcgatcatgtggcagtgatggaccgcgttcggcgccgtattggagacaagcgtctgtgtgccctggtgaaagcattcctcaaagcaggtgtactgaacgatcttggcgatcgtgaagagtcactgactggtacaccgcagggcggtatcctgtccccgctcctggccaatatcgctctcagcgctttggatgaacactttacccgccagtgggacaccgataccggtatgctggggtcgccggcgcgtcgcgcaaaacgtaagcgtgatggcctgggcaattggcgtctggttcgctatgcggacgacttcgtcttactggttagtggggatcgtcaccacgccgaagccctgcgcgaagaagtcagcgcggttcttactccattaggtctgcgcctcgcaccagagaagacctcagtagtccacatcgatgaaggctttgattttctgggttttcacatccgtcgcatgcgcaagcgtggtaccaataaacattacgtgtacacgacgccgtctcgcaagagtgtccagaaaattcgcgatcgcgttcgcaacaaaacctatcgcagtacattaaacatggaccttgacgaactgattgcgggcctgaaccgctctatgcgtggctgggccaactacttccgtcatggggtgagcaaagctacttttaatactgtcgacaaccatgcgtggttgcgtttggttggctggattcgccgtaaacatcgtaacacgtcccgcaaacagttgcggcgtcggttctgtgatcaaggatggcggattgcccacaatggagtagtgtttacgggcgcctcttcggtggcggttacccgttatcgctatcgtggcgcgaacatcccaacaccttggacgcaggccgcgacttccagc

SEQ ID NO: 255 - DNA, 1428 bp, synthetic construct
  source 1..1428: mol_type = other DNA
atgaacaccgatgaaagcgaacacgcactgtatgaagccgagcgccgcgtgttagagatccagaccaaacttcatcggtgggcccgcgaagattcgcatcggcgttttgatgatcttttcaatcttgtcgctgatccggcgtttttgttggttgcgtgggctcgtgttcgtggcaataagggtgcgcgttctgctggagttgatggagaaacggcatactacgtggaagcagtccgtggcgtggaagtctttctggatcgcttgcgtacatccttaaaagatcgctcattttgtccgttacccgttcgcgagcgtatgatcccgaaagcgggtggcaaacttcgtcggctcggaattgccacggtaacggaccgtgtggtgcaggcgtccctgaaactggtgctggaacctattttcgaggcggacttcttaccgtgctcttacggatttcgtccgaaacaccgtgcccatgatgcggtagcagaagttcgtcacttcaccagtcatagctacgagtggattgtggaaggcgacattaaagcatgttttgacgaaattagccatcttgctctcttggaccgtgtgcgggcgcgtattggggacaaacgtgtgctggccctggtgaaagcattcctgaagagcggtatcttgggtgaagatcgtgttttgcgcgagaatgacgcaggtacgccgcaggggagcattttgtctccactcctgtcgaacgtcgcgctgtcggtcctcgatgaatatattgccaaaggcccgggcgggcccggttcaactttcaatgatcgcatcaagcgtcgtcggcgtggcctgccgaactaccgcctggcccgctatgccgatgactggtgcctgatgatccacggcatccgtgccgatgcggaagtactgcgcgaagaaatcgccggggtgttagctccaatgggcctgcgtttaagtgaggaaaaaactctgatcacccatatcgatgaaggcttagactttcttggttggcgtatccaacgccatcgcaaacgtgggtccaaccgctactatgtctatacatatccggcacgcaaggccctggctgcggtaaccgataaagtaaaagcgcaatgccgtaaaaccggcactgacctgcctctggatgctctgctgatttgtctgaaccgcatgctgcgcggctggtgtgcatattttcgcccaggtgtctcgtcaacagcgtttcagtacctgagcagctatacctgggggcgcgttattcactggctgcgccgcaaacatccccacatgaactggaaagagctccgtcggcgtttttgcggcggcggttggtggccggcgtccgaagagcgcgaactcttcaatcctgcgaaggttggtacgacccgttatcgctatcgtggtagtgtgattcctagtccgtggccaattaccggt

SEQ ID NO: 256 - DNA, 1905 bp, synthetic construct
  source 1..1905: mol_type = other DNA
atggctagcgcatggagtcatcctcaattcgaaaaatccggaatggccaaaggcggcagctacattaacagcatcctgctgatggagaatgttaagtatattatgacgaacccagaaatcatcctgaataaccttgtaaaacactcaaaaatttctggttacaaattcgagcgcttgtaccggatcctgttcaacgagcaaatgttttatcaggcctatcagcgcattgcgtccaaaaaaggaaatatgacctcgggtacggacggcaaaacggtggatggtatgtcaattgaacgcattgagcgccttattgcttccctgcgtgatgaaacctataaaccgcatccggcaaaacgcgtgtatatccctaaaaaaaatgggaaaaaacgtccgctgggcattccatcgtttgaagataaacttgttcaggaagttgtccgcatgatcctggaagcagtgtacgaaggttattttgaaagcacatctcacggtttccgcccccgcaaaagttgccagacggccttgacctcgattcgcaacacatttttaggcactaagtggtttattgaaggcgatattaaaggttttttcgacaacatcgatcacaatgtgctgatcgaaactttgcgtgaacggattaaagacgatcgttttctgcgtttaattcgcaagttcctgaacgccgggtatatcgaagactggaagttcaacaatacctattctggtacaccacaagggggcattatctcgccgatcctcgcgaatatctaccttgaccgttttgacaagtacatcgcagagtacatccagaaatttgatacaggtaagacccgtccgaaaaatcgtgagtaccgtatctatagcgatcgtaaacggcgcttactcgcgaagtttaatgccgaaaccgacgcggataaacgtgaagaaatggctcagcgtttaaaggaatattctcgtcttatgtatgaacatccgtctgtggacgaaatgacgcccacctataagcgtatgaaatatgtacgctacgctgatgacttcctgattggagtctgcgggagtaaagcggagtgcgagatcattaaaaacgatattgcgatgttcatgaaagagaagttaaagctggagctgagcgacgagaaaacgttgatcactaatgccaaagatcgggctctgtttctcggttatgaaatcaccgtgcgtcaaagccaatcgactaaacgggataaaaatggcatgctgaaacgcatgttcaatggtaaagtaattctgctgctcccgcgcgaagtcgcgcgcaaacgtctgttatcctataacgcgatgaccatcattcaggtgaacggcaaagaagattggaaaccaaaaagtcgcggcgcaatgaacaactgtaaacctgaagatatcttggctaaagttaactcagagatccgtggtttctacaattattatgctattgcgaacaatattagcacgctgggaaagcgttttggctacgttatgagttatagcttctactgtaccctggcccagaagttaaacatttcctaccccaaagtcattaaaaaatatcgtgaaggcaaagattgtgtaattcgctataccgatgcgaaaggtcgtgaacgctgccgtatgttgtacaatggcggatttcaacagaaagaaccgacggcggatgccaagtgtgacaatcttccgaacccgtttgttatttcatccccgagcctggttgaacgcctgaaagccgaggtgtgtgaattgtgcggcgcaaaagggaaaactgtcatgcatcatgtgcgtacgctcaagaccctgaccgaaaacaccgcgtgggaacgtgcaatgctgcagatgcatcgtaaaagtctggcagtctgccctaactgctacgcacacattcatgacgattga

SEQ ID NO: 257 - DNA, 2970 bp, synthetic construct
  source 1..2970: mol_type = other DNA
atggctagcgcatggagtcatcctcaattcgaaaaatccggaatgttagaagttaaagtttccaaccggttgacttgtctgaccactatctctggccctgccaatgttgtctgtcccatcgactcaggcatcctgttccaccgttattatgtttttatttctatcaataccccgttacattcaacaccgatgcgcgtgtgttcgttttttaatgcatgcagtaagaaacgtagtaattgctttaaagcggcaattcgtggattttccagcgatctttctagctccgaagataaagatcgcacagtcgttagcgtgagcagcaaagagtgtttcctgccggttccgtcgcgcaaagcggatatgtcgttgtctgtacagtccattccgagcaaactgtcaaataatcacgtggaaggaagcaccgacgtggtcgactcgttacgccaactgaaaccagaaaaagatggtatctacacccgtattaccacccggtttctggccaatcctgagttcctgaaacttgcgtatgctcatatcaaaaataaagaagggaacatgaccagtggtggctctaactcaaacatcattttggatggcatcagccagaagtggtttgaagatactgcccttcgcctgaagaatggcacgtatgagttcagcacctctcgtaaaattaacatcccgaaaaaaggctcgctgaaattgcgccccttaaccattggtaatttgcgtgacaaaattatccagaaagcgattcaactggtgttggaagaaatctatgaaaacaaggaaaaaatctttagtgatgccagccatggatttcgcccgaatcgctcatgccatacggcactgcaacaaattaaaaacgaatggaccgccattccatggtttatctccattgacattaaggatgccttcggaaccattaatcgcgacatcttaatcagttgcctgaaagttaaaatccgtgaccagcgtttgttcgagattttacttaagatgttacaagcggatattatttccattaacggtatctggaaagaattttatggcgtaccgcagggcaatattttatccccgatcctggccaacatctatttccacgacctggatgtttacattgataaaaaaatcattaaccgctacaaaaagggcacaaaagcagcgcgctgtctggattaccagcgtgctgtttcttttactaatgaggaaaaaaaagcaagtctccaaaaacgcaagcagctggctcgtcggaaacgccgtgacgctcataaagctggtcttcgttataccaaaattgatggtagctttattcgtgtaaagtacgtccgctatgcggatgatttcctgatcggggtgcgtggcccgaaaaccttggtcctgaagattttccggtctgtcatcttctttctgaaatcgacactccagcttaacctgaacgaggagaaaagtaaaatcattgatagctttagcaacaagatcagcttcttgggtatgctgattcataacgtgtcaacgaaaaaactgccttttcgcaaaagtcgtgcgttacagaataaaaaacgtaagctgacgcgtgtcctgctgcgcgcggatgcattagaaaatcagcgcactaaaaaactgaaagatgagtgcctgaagttgctccgtaatagttataagtcgtcccgcaaagatcggaagccgttgaaagaagacttcatctctttgattaaaggttctcctgtatttggtgacgttatcaaaaactcaaaccgtgcaatctaccgtgagttcatccaaagccttctcctggtgtccgatattcaggaaaaccataccctcaaagattttctgaacctgtgggaaaaggagctgtcattagacacggaaaagttcaaaaacgagaattctcctacgcgtccgattacgaaaagtgaaaccatccgtcgcattgtagagattctgaaagtgcagcacaaccttccagcacaggaagtgcagtggtttcagctgttcaaaggggcgaacaaagcccgcgggtcggcatggaaaccggtgtggattgacaaattttcactgagcaaaaacgctgtgtccaaactgaaattacctgtgaataatatctatcacgtaaagtataacgtggagaacattcgcctggtcattgaagatcttctgctgcaagcggaacaacgcccgagcaaaacctacattgatcatattccaaacaacaatgcgaaaagtgttcgtcagacgtgggatgaagaaggcgtctttacgtctttgccgccacagattaacagcgatacgtcggaaatctataaacgcttaaaagaagcatccatcattaattcgaaaaaaaagcccatttgtaagaattcgctcctggctgcggaagcgtggctcatcatttcatattacaataccctggcgcacggtctgctcagctactttcgctgcgttgataatttcaatacgatcaaaaaaatcgtcacttaccaccttcgttatagcctgttacacaccttggcgcataaacataagtgtagtatcaagaaggttctggagatctactcgaaagagattaaaaccaatggccgtcagggcaaggtcgtgtcgtttattaactccatcgccgtgacaaaccttaaaaaggactttctcttcaaagacctgcgtaacccgtacagcaacctcacgaaaagttatatttcactccagcggggtgctatttccgccaataagtgcgccgtaaaaaactgcgtggaaacagacaatattgaagtgcatcacgtgcaaaaactgttccggaacattgaccgtactgggaaagtagtgattcagggtattgccaaaaaactgtcaggccgtctggccatggaaagcgcgctgaaacggaaacaaattccgttttgcccaaaacaccataaagattggcataacggggttattagcaaaattgatctggatgaaccctgggtctga

SEQ ID NO: 258 - DNA, 2607 bp, synthetic construct
  source 1..2607: mol_type = other DNA
atggctagcgcatggagtcatcctcaattcgaaaaatccggaatgcgtgatgttaataatggctggctcgtgcgctatctgcacagcaatactgcttcagcattcttctttctggtgtacctgcacatcggtcgtggcatgtactatgggagctatcgtgcgcctcgtaccctggtatgggctatcggtacggttagcgccccgaaaggccgctactttggtagtgtccctcgccgcctgttcaaatccggtattgatagtattcagttcgaatatcgcatgccattaccgggtatgtggctgattaccctgtcctttggtattgcgggtggtcgttgctctatggtccgtatcctgttcaacctgcagctgacggcatcaggcatctggcatggtaaagataatgaattagatacaatcaaacatcaccgtccgcgtggtaatgatcataaccgttcctgccaccattttgacggcgtattacgtgttatttggctggcgcatggcgagacgaccaccccctcagcaacatcccgtcgcttcaactgctgtaagtgcctgaaccaaaaagtcaccaatcttagcctgcttcgggatcgtacggcatatgcaattggcacgcgtcgtcgctcttttcatacgcgtggtcgcgtcgaacggccacagcaggactccaaaggctcctcttttaatcaggagattctggaaacgaaagtgctcgagcagcgcaaggcggcgggcctcaccagcagtaaagtacgcaaaggcgggaaacgcgcagcgctcgtgacactggtgcgcaaagaacttcaattgtacctggataaacgcggatcgtataatggcctgatcaatattctgaaaaacccggagtaccttgtagcttgttatgagtcaattcgcggcaaaccgggaaacatgactaaaggttccaccaaggaaacgttagatggtttaacttgggaatggtttgtcaaacttggtgaatcattagccaaaggcaagtttgactttaccccagcacgtcgcgtcatgattccgaaagctaatggaaaactgcgtccgctgggcattaattcgccgcgcgaaaaaatcgtccagaaagccctggcggttattatggagcagatttgggaacgcatttttctgaactcgtctcacggctttcgcccgaaccgttccatccattctgcactgaaagaattatatttggaagggggtaactacaactgggtaattcagggggacattgaaaaatgctttgatgccatcccacacagtgtcatcatgaaccgtgtacagaaaattatcaagtgcaaacgcacgctcgagctgattaaaaagtcgctcgatgccggctacatcgatcccgatactaaaaaaacggtgaatagtgatctgggaactccgcaaggaagcgtgctgtcgcccttgctgtgtaatattgtgttacatgacttcgatgcgttcatgtcatcgatgcgcgaagaatataactttggtgaaaaacgtcgtccaaaccccgattacgtgaaactgaatagtaaacgtcggtatatccgcgatattcgggaacggcgtaaaattcttcgtgaaatgcgtcagctgctggctagcgatcctatggacccgaatttcaaacggctgaagtatatccgttatgctgatgattttgttatcttaatcatcggcccgctcggcgatgcggaaaagatcaaagaacggattcgtgacttcttattgaacaaatgtgggctgaccctgtcgctggagaagacggtgattagtaatatccagaccgaaggttttaagtttctgggtgcggaatgtcgtcgcgccagcatgaccaaaaatcacgttgtgaaacataaagaccgtacgatccgtgcgacaacccgtctgcgcgttaacattgatctcactaaggtctacaagaagttggtgagcattaaagttgcgacctgggataacaaaaatttgcaggtgccgcgcggtaccgcgaacaacgccttgattaacttctctcatgccgaaatcatttcttggtacaacagcaagatccaggggatccaaaatttctacagcttcgctggcaatcgtaaacgtctgcacttggtgttttggattctggcttcgtcttgcgcactgacattagccaagaaacataaaatgagcagcatgggccaaatcttcaaaaaatttgggcgcaatcttacctgcccagagacagacgttagtctcgttcgcccgtccgcgttagaagccattcatgattacaagtctaacaatgtaccggataaccttgactttctggacgtgacctgggccgccaaacttactgagtcaaacattgggaaaagttgctttttatgtggctccaccaaagacatcgagatgcatcacttgaaaagcgttaaagacgtgaaacaaaagatccgcaacggaaacgcctcgttctcggcgtggaaaggcgcatttttgcgtaagcagatccctctgtgtagctatcaccacgatctttatcatgggggcaaactgaactatgcggatttgaaacaaattagtagcttcaccaaactgcctgacagcccgtcagacaacaaatga

SEQ ID NO: 259 - DNA, 1782 bp, synthetic construct
  source 1..1782: mol_type = other DNA
atggctagcgcatggagtcatcctcaattcgaaaaatccggaatgaaagaaaaggaagatcgcaaactcttgtccagcaaagatattattagtaaagatattacgtatgagctcctggcaatcatcaagaataaaggcaacaatcggtacggttatcttctgaaattcattagtaacgtcgacgtgttactgtcatcctttgaacatattgtacgtaaagatggttattactcgaagggttctgacaaacagattttaagtaacgttgacattaagtacttcgagaatctttcgcgcgaactgaacagcggatcctataaaccgaatccgtcgcgtcgtgtttatatttctaaacctgatggcagcaaacgcccattaggcatcagctgctctcgtgataaaattgtacaacaagcatgtatgattgccctgtcgtatatctatgagagtatttttttagaaaactcacatggctttcgtccatacaagtcatgtcacacggccatcaactactttaaacttcacttcacgagcaccaagtggatcctgaacattgacctcaagggatgcttcgataatatcaatcaccagaaattgatctcgattatcaatgagaacgttgacgataaaggctttgaaattctgtattggaaaatggtgacagcgggttatatctatcgtggtacccactttaaaaccattgaaaaaggaactccccaagggtcaattctgtctccgattctgtgcaatatctttctgaacaagctggatatctatcttctggacttgaaaaatgaatttgacaaagggaccgaaaaacgcaaaaacaaaagttatcgtaagctggctgtcaaagaagcacgtaaacagttcattacctctcgtgatcagatggataccaactttaaacgccttaactttgttcgctatgcggatgatttcattatcggcattgatggtagtttgagcgacgcgcagctgattggggcgaaagtcgaaaaatttcttaaaggagagctgctgtttgaaatcaaacgcttcaccattaaaaacttttgtcaggaaggtgataactttctcggcttcacgctgaaagggtggacgactaagagtcgtaaaattatcaatacgaaaaaaggcaaacaattggtgaaccatcgcccaaaggtcctgattccgactacgaagattctgaacaaattgcatgaaattggcctcgttaagaaatacagcaaccattttcgtgggaccgcctaccggaaactggtagagcatccgttatacaatattgtggagtattttaattcagtgtatcgcggcatcgcgaattactactgcatcgcctacaatattaacaccctgcgcaacctgaattacattttaaaagtgtcatgctgcctcacaatcgctctgaaaatgaaattattcactgttagcaaggtgctgaaaaagtatggtcggaatgtgacaatcaatgaaaacgatagcaccatcaagttcatttcctaccgtaaactgaagaaaccgtatttcaaaagcatcgaaccgttcaatttggacaacatcatcaaattttttagctatggcttgcggagcaaacttaaaaccaacaaaggctgtgaaaactgtggttcgtccctcaacctgtctctgcaccacttcaatcccgtacgcaatatcaaccctaagctgaaaacattagagaaaatcaaaattaaagtcggtcgccagcagattctgctgtgccgtgaatgtcataataaactgcattccgctaaatga

SEQ ID NO: 260 - DNA, 2547 bp, synthetic construct
  source 1..2547: mol_type = other DNA
atggctagcgcatggagtcatcctcaattcgaaaaatccggaatgcggaaacataaacgcatccacttcggtgtgttcctcaacatccggagcttaatgatttgcgagtcgagcttattagcaatcacgatgcttctgaccgaccgccgtgcgacggttcggtttctgtggaaattgcgtttgcttattaaccataaccttctgaacagcggtatgtttcaaaataccgaaatcctcacatggcactactcctcaaccgatgctggtgataatagcctgtaccttacaggcgtgagcgatcttgggactgtgaaagcctacccgctgcgtaaagtgaccaatcaggtccagtgggtcattcgcgaaggggaaaccctcgctggtccagtggatcgttcaagcatgccgacgttaacaagctgccaggcgttagcgattcatctggagacagagtcttttgatgctgatcttcccattcctaaggttgaccagctggtgtttaacaaaaaatcgtccgaggcaaagccacacctctcgtttatgccgagcattgcaattcccgttaacctgcaaaaccacaaaaaaaagatgcgccgcgggcgtggcgccgttgtacccaatacgatgggccgtgctctgtgcggcctgagctttacccaggatcgttcgctgtctaccaaaacctttcaaagtgacgtctctcagggtcggatcccaaatactatgattaaacgcctcgaaacgctgtctaagctttttacccacaatcctgacgcccaggcagatggattgatgcgtattctcaaagattcccaaatttgggttgcggcctacatcaaactgaaaaccaacccaggcagcatgactgaaggtggtgataaaggtacaatcgatggtacgtcgctgaaacgtctgctgatgttacgcgatagtgtcctggacaacacgtatttgacgggtcgtgcccgtcgtaaaaacattccgaaaccgcagggcgggacccgcccgctgggtattccgacctttcgcgatcgcatcgtacaagaagtgattcgttctatcttggaaactatctacgaaccggtttttcataaaacaagccatgggtttcgtccaggcctgtcacagcacacagccctgcgcgatattcgcaaaaacttccgtggcgcgtcttggttcgtcgaaggcgatatctctaagtgttttgataaagtggatcataccattctgatccgcctgctgcgcaaacggattgctgacgagaagtttctgagtttaattaaaaagatcctggtgaacatcgtaaaagaggaagataacaccgaaacggtatcgatcatcggcaccccgcagggcggcatttgctctccgctgctgtccaatgtctatctccatgaattcgatttgttcatggagaatcttaaggaaaattacgacaccggtactcatcgccgtcgtaatccggagtatgatcgccgttaccgcaaaggtggcgttcaagaagcacgtaaagtgtcctacggagccccgaatgacccgtattttcgtcgtttaggttacgtccgttatgccgacgattttctgatcgggattattggccccattcgggaagcgcgtgaaattcgtgagcaaattcgccagttcctgaaagacacgctgaacctggaactgaacatggaaaaaacgaagattagcaacccgagttcacataaaatcaagtttctgggttatgttctgggtaaaagtggccgcaatgcgtatacatatattcgtaagtatcagggtaccaaacgtaaaatccgcgttatccgtggcggatcgccgtatctgaaagtcgacacccagaaagtaattaaagccctcgcacagaaaggcttctgtgatggcaaaggttttcctaaacctaatttctattatctgccagagccgcaaacgaccgtgattcggaaatacactcagatcttacgcggtttagaacgttactaccatctggcggacaacaagcggcaggccatctccaagttcaattatatcttgcgctatagcgcggcgaaactgttcgcggcgaagtacaaactgaaaagtatgagcaaagtatttgcactcggcggcaaagacctttcaaagcccattaaaagtaaaaatgcgattggcattacggactcagccttggcggaaatggaagagactgtgaccaataaaccgtcacgtcgtcgcacccaaactctgaaaggcttgccttttaccaagtatagcactatcagtaaaccggacattggagtgttcacgaagtataagaacaatcacccgttctcgaatcctctggaatccttaacctggcgcacgattcgcggggtggatgctttcaaactgccatgcgcgatttgtggagctgaaaacaacgttgaaatgcaccatatccgtcagcttaaaaacctgaaagggaaagatttgatcgaaaaaaagatgatttccgcaatgcgcaaacagattccgttatgtcgtaaacatcatttggcagcccacggaaaaaaaatgtataaatga

SEQ ID NO: 261 - DNA, 2520 bp, synthetic construct
  source 1..2520: mol_type = other DNA
atggctagcgcatggagtcatcctcaattcgaaaaatccggaatgcatattattcaggatttggaagatcgtcataaccacctgaacaataccaacttgaaaagctctatctccatgtggtatgaacgctggttcttatctaccaacgccaaggacattggcaccctgtacctgatgtttgctctgttctctggcttattaggaactgcttttagcgtactggtgcgtcgctgcgccaagctgttattaaacgatccgtttatccttcacagctcgaatatgttgacgaccagtggcctggttgggctcgaacgtgtgcccatgaatattgcatgtctttctaaagcattaagcatctggaaccaggtgtgggaaagcatgcgtgtggtggtccccatggttaaaacgaccctgttcaaactctatctgaaaggtaccagccggaaaggctccaaactggcgtggaaccggttatgcatcctgatcgagattatgtacgtgcgcattttaatccgctgtaacattacccagatcacctgcagcaataaacgcgaagaaggtgaaccgaaaggaactattggcaataactatgaactgcgcgatcatctccgtgggcgctcgtcactgctgtatggcgatggggatttcgtcgtgggtggtaaaaccccgaaaggcgtccgtatgtttagctcgaaaggcgtgaaagaaggttctggggtgcgtccggacctgaaccaatccgaattgccaaataagtttacgaaacttatcgatatctcctcaaacaaagtaaacaacatgaagttcaacgacctgtatacgctgatgttcaacatgaagatgtacgaggtcgcctaccacaaactgaaatcaaaccctggcaatatgtcgcctgggattgaccaaatcaccttagatggcatcagtcaggaagtatttcaaaacatcatcctgaccatgaaggatgagagctttaagttcaaaccaggtcgtcgcgttgatattcctaaagctaatggaaaaacacgtcctttaactgtcgcaagcccacgtgataaaattgttcaggaagtgatgcgcatgattctcgaagccgtctttgaaccgacttttagtaacaattctcatggtttccgtccgaatcgttcgtgtcattcggcactgcgtcaagtcaaaacacagtttggtggcgcgagtttttttattgagggtgacatctcgaagtgcttcgattctttcgaccacgataaactgattgagttaattcgggaacgcattagcgacgaacgctttattcgtctgatctggaaatcgttgaaagccggctatgtacagtttcatcgtacgaaactctcaattattgggacgccgcaaggttccatcatcagcccgattctgagcaacatctaccttaataaactggacctgttcatggacaaacttaaagacgatttcgatcaaggcaaaagtgccaaaattaatccaatctacaaaagtctggactattatcgtcaaaaagcgctcaaagcgaatgaccagctgggtgcgctgaaatatctgaaagagatgcagaaaattcgcgcgcgccttccgaaagatgataattttaaacgcttgtattacgtgcgttatgcggatgactggatcatggccatccgcggaccgctctcagagacgactcggatcttggagagcacccgcgaattcttgcgcaaggagctcaacctggatctttcgaaagaaaagacgctcatcacaaacccccataaagataccgcgatgttcctgggcacccagattcgtatttctaatcacacatatttttatcgcggaccaaacggccagaccatccgtgcggtatctcagttaatttttaccgccccgattgatcgtatccagaagaaactggcagatgcaggtttttgggataacgcgaataaacgctccgtgccgcggatgctttggtaccacgagaataaagacgcgattatcatcctgtacaatagtgtcattcgcggctatctgaattactactcttttgtttcaaacttcggtcgtctggctgcgactgttgaatggattctcaaatcaagttgcacgcaattgttagccgcgaagtttaaactggggacgacactgaaagttattgacaagtttggcgaagacctgaaaggctcggacaatatcgcactgttgaagcctagctatcggaagaatacctgggatttcaagctgaacaacagctacgtgaacctgaaggcgctgtatgctaaaggtattagcaaagcctcactggatggtctggtatgctccaagtgtgaaagtgatgttcaggttgaaatgcaccatattcgtaaacttgctgatttgaatccgaaacttagcgaaattgatcgtattatggcatccaaaaaacgcaaacagattccgttgtgtcgtgcctgccacattgatcatcataaacgctcctttctggatcgtactcgttccaagagtctgattcgcaaaatcattaaatga

SEQ ID NO: 262 - DNA, 2127 bp, synthetic construct
  source 1..2127: mol_type = other DNA
atggctagcgcatggagtcatcctcaattcgaaaaatccggaatgcgcgttgaaaaaaaccaatatcaggagctctcgctgacggccattatcattcgtgacgtcattagtatgactaaaggcgttttacgtgtgaatatcccggttgtcactgtcaccgtcgggttacccaaaagtcgtaaacgctatggtaatggtggcttaattgtagcaggcatcaaaacgcaagtgttttcgaatacgtcaaaggttatgttccgtgagtgcgaagtaacccagcgccgcggtttaacgacatcgaatctcgttatgggtcataagaaattagtacaggaccttaacaataacttctacaaagacaaaatctgcaacccaacgaagctgatccaagcctatgaattggtgtcgagcaataaaggctccaacaccaaaggtatcgatagcgaaacactggacagctactccaaggacactattcactcagtatccaaaagtttgaaagatcactcgttcaagtttaaacccattcgtcgcgtcgaaattgccaaaagcaacggcggatcacgtaaactgggtatcccttcaccgcgcgataaagttgtgcagaaagttatggccatggcgttggaagagatctatgagccaaagtttagcaacagttcccacggctttcgtcctaaacgtggaacccattccgctctgaaaagcgtcacccggtggtctggtacgaagtggttcattgaaggggacatctcaacttgctttgataccctcgaccatcatatcctcgaaacgctgctgaagaaagaaattagttcgaaaccgttcatcgatctgtactggaaggccgtgaaaagtcactatattaatcccgtcaataaggtagaagaattctctaacgtgggggtaccgcaagggggcgtactgtctccgattttatccaatatctaccttcatgagctcgataagttcatgcagacgaaaattgaggaaagtaagaagtcgggtccgaccagcatcgacaatccgcattacaagaaggtgcataccaaaattagcaacatgcgtcagtacttttctccaacctatcgccgtaatcgctctctgaccaaggaacaggagcaggaacgtctgaaagaaattctgaaattggagaaagtgcgcaccaaactgagctcgacaattcaaggcccgggctatcgcgtttattacgtccgttacgccgatgattttctgattggaatcaatggtccgcggcgtattggtgaaaaattaaaacaggaactgcaaaccttcctgctgaacgaactgaaactcacacttaacctggagaaaactaaagttactcgcagcgatcatggtgcttgttttctgggggcgcgcctgaaacgtcacgcatcccgcaccaatgatcagaaacgccgtacgtcatccgtgacgcgcacaggtcgtaaagtgcgtgcgcgtgtgccacagggaaatatcatcgcgttagcgccgctggaacaccttattcggaaactgcaatcccagggcatctgcaaaactcgcaacctgaaaaaacacgacgtgattcctacccgtaaaaccgcttggaccaacctgaatctcgtgaccatcgtccagaaatataacaacgtgtggcagggcctgttgaactattacagctttgcgtacaatcgttgtcaattgaactggattcagtatctgttacatcacagcctggcatgtacctttatgaataagctgaaactgaactcacgtcgccaggtcttcaaaaaatacggcaaaaccattcaggtgaaagatgaatctggcaaacttgttgcgttcaaacttgtgaaaagtcttccgcgcattgggaaattttcgaacaagattctgcctagcggctttgagacgtttaagtatagcttgcgcacacaaagcgtttttgataaagcttgcaaaatttgtggaaccaaacgtaacgttgaaatgcatcatcggcggccgctgaaagcacataaaacggataacactttgaaatctattcaaatcaaccagtctcgtaaacagattccattgtgtgcaagttgccaccagcgtgtgcataatggtctgtatgatggcccgggcatctattga

SEQ ID NO: 263 - DNA, 1848 bp, synthetic construct
  source 1..1848: mol_type = other DNA
atggctagcgcatggagtcatcctcaattcgaaaaatccggaatgcaggaaatcgagacagtattgaacgtaattcagaaccgtggcaaacagggtaaaagtctggaacgcctgtaccgccagttgttcaaagaagagctgtacgaaaaagcctacgccgaaatccatgcaaacgaaggggcgattacgaaaggtagtagcaacgatacgctggatggaatgtcccaaaagcgtatcgcggaaatcattcaaaaagtgcgtaccaccacataccgctggaatccggtacgtcgcacctatattacgaacgaagatggacgcaaacggccgctgggtattccgtctggggatgacaaactgttgcaggctgcgatgaaactgcttttggaagcatattatgagccacagttcagtaaacgctcgcatggtttccgcccgggccgtggctgccataccgccttaaaacaaatccgcgaatcccatcgtgacacatcctggttcattgaaggcgatattaaaggctgttttgataatatcgaccacgaaactctgctcggcatcatggaagagaaaatccgggaccagcgttttcttaacctggtggaataccttatgaaagcggggtacatggaagattggaagtggtatggaacctattcaggtacgcctcagggcggcatcatcagcccccttttggcaaatgtctatttggacacttttgataagtgggtggaagaggagttgctgcctcactataactttggtagtcagaaggagaaaggccgtaaacgtaatccggaatatcgtcattatgaatataaacgtagccaagctaagaaaatgggcgatgttgaggcgtatgagcgctacgggaaaatgatgaagaacgtcccgtcgattatcgatgacgatagctaccgcaaacttgaatacattcgctatgccgacgactttctgctgtcttttgccggacccaaaaaggaagcagaagagattcgcgagcggatctctgagtatctggaacgcgaactgaacctcgagctctcaatcgaaaaaaccttaattacgcacgcgcggaatgataaagctcgttttctgggttatgatctgtgcgtcatgcagtctgatgaacgccgtacggcgaacggtacgatctggctcggagttcctcgtgaagtgcgccgtaaagcaatgcgcaagtacacgaagaaaggtaaagccgtgcatcgcccagaattactgttaaactcagactatgatattgttgcgcgttttcaggcggaatatcgtggcctggttcagtattaccagatggcccataacgtacaccgcttacaagaagtagagtgggtgaccgggacctcactcctgaaaacgctggctggcaaacacaaaacctcggtcaataagattgtcaaaaaacacaagagcacccgtactgttaatggtaaaacctacaaagtcttcgaagcgcgcgcagaacgtaaagggaaagagccgttaaccactcattacggcgccgttccactgatccggaaaccagaagcttccattacagatcgtattgttaccctgggcaaaggtcgggtggaactcttacaacgtctgagcaacgatgaatgtgaaatgtgcggcgagaaaggtaacattgaagtccatcacgtgcgtaaacttcgtgatgtgaataaaccgggccgcaaaaataagccggcatgggtgcaccgcatgagcgcgctgcgtcgtaaaactctgatgacctgcgttaattgtcatgacgctattcatgccggtaaacatcgctcggagtgggacaattggaagattgtgctggaaagccgtgtgcgctga

SEQ ID NO: 264 - DNA, 1818 bp, synthetic construct
  source 1..1818: mol_type = other DNA
atggctagcgcatggagtcatcctcaattcgaaaaatccggaatgcagagtgccgaggtggtgcttggtgtattacgtgaacgtggccgtaagggattaccttgtgaacaactgtatcgccagatgttcaataaagacttgtacctgctggcctatgggaacatctactcgaacagcggcgcgatgacaccaggtgcttcagaagaaaccgctgatggcatgagtgaagaaaaaattgaacaaattgttgaagcgatgcgttgcgaacgttatcgctttgcgcccgctcgtcgcacctatattccgaagaaaaatggaaaactgcgccccctcgggctgccatcctggtctgacaaactggttggcgaggtggtacgcttactcctggaagcgtactatgagccgggtttttctgatctttcgcatggttttcgtaaacgccgtggttgccataccgccctgcggaaggttcacgatacgtggaccggcaccgtgtggtttattgaaggcgatatcagtgattgcttcggcagcctgtcccatgaaattctgctggggatcttggctgaaaaaatccacgaccaacgttttctgcgtttgatccgcaacatgctgaaagcaggctatcttgaagattgggaataccgcgaaacgctgagtggctgcccgcagggtggtgttgtgagccctattttgtctaatatctatcttcataaactggatgagttcgttgagcaggagctcatcccgcagtatacacgtggtacgggccgcaaagtaaacccagtctataaacgtctgcatcgtcatatgacctcggcacgcctgcgcggggaccgggcagctgtccgggatctgaaaaaacagctccgcgcaatcccgtatggggatcctatggatccgggttaccgccgcttaaagtatattcggtacgccgatgatcacattttaggtttcattggcccaaaagccgaggcggaacaaattaaagcacggctggcgaagttcttacgcgagacgctgggtctggagttgaaccagcaaaaaaccctgatcactcacgcacgctcccaaccggcccgttttctgggttaccacgtgcgtgtgcagcattgtaacaccaaaattaccggcggccagcgtagcgccaacgggaatatcgcactgcgcgtgccgccggacgtgatccgttctcagtgcgcccgctaccggaaacatggtaaaccttggtatcgctcccgtctgcagaaccttgacgattatgacatcgtccgtacatacggcgccgagtaccgtggcgttattaattactatttgttagcccaggatgtgtcacgcctgcatgaccttcagtggaatgcggaaacatcgatgctgaaaaccctggcattaaagcaccgttcaactgtaagcaagatggcggcgcgttataaagcgaaaatcgaaactagcgatggcctgcgtacgtgttttgaagcgcgtaaacatcgcgaaggccgcaaagaccttgtcgcacgttttgggggtattattttgcgccagaatcgtcgtgcggtcattacggatcctgctagcggtccgccgctctacccccgtaaagagctcacccggcgtttacgtaagcgcgaatgtgaattgtgcgaaactggaacgacggttgcggttcaccaagtcactggtctgaaagatctgggaaaaccgggcgctggacagccggcttgggccaccctgatggccaagatgcgccgtaaaaccctcattgtatgcgcgccatgtcatgactggattcatgccaacccggtggcgcacgcagcgtga

SEQ ID NO: 265 - DNA, 1827 bp, synthetic construct
  source 1..1827: mol_type = other DNA
atggctagcgcatggagtcatcctcaattcgaaaaatccggaatgaaacctactagcgaaatcctggaacgtatgaatcgcaactctggcgaacatccggaaggcgtgtacacccgtctctatcgttatcttttgcgcgaagatatctacatgacagcgtacaataatctgtatgccaacaatggcgcgggtaccaaaggcgtcgatgacgacacggccgatggtttcagcgttgaatacgttcagcagattatcgcagagctgaaagcgttaaactacagccccaaaccggttcgccgtacctaccttaaaaagaaaaatggaaaacttcgccccttaggtattccgtcttttaaagataaactggtgcaagacgcggtgcgccaaatccttgaatccatctatgaaccaattttttccgatttttcgcatggttttcgtccagatcgttcgtgtcacacggcactgaaacaagcgtccaagtattttcgcggcacgaagtggtttattgaaggggacattaaaggatgcttcgacaacattgatcatacagtattacttaacctgttgagtgagaagatcaaagactccaaatttgtaactttaattgggaagttcttaaaagcaggatatatggagtcatgggaatatcataaaacctactcgggtacgccgcagggcggcattttgagcccgatcctggctaacatctatttccacgaattggataagaaagtggaacagctgcgtgccgattttagtcaaccaaatcctaaaagttgttccctggaatatggtcgcattcgtcgggaaatcttgaaaaaacgcaaacagtatggtgaattgactgatgatacgcagaaaaaatcattactgcgcgagatccataaactggaaaccgagatgcgtaaactgccttataaagacgcaactggccgcaaaattgtatatgttcgttatgctgatgactttctgatcggcgtttctggctcacgcaaagattgcgaaaaaatcaagcaggagctgaccgcctttattagcgagaagttaaaattggagctcagcgatgaaaaaacgcgtatcacccacagcagcgaaaacgctcgttttctgggttacgacatcaatgtgcggcgtaacaaccaaacgaaacgtaccgcgaaaggcaccgtgcaacgtaccctgaaccagagcgtggaactgctggtaccgtttgaaaaaattgagcaattcatgtatcagcgtgaaattgtgatccaagccaaggacggatcgctgattccgtggcagcgcgacgccatggcggggctgaccgatctggaagttctggatacatacaactctcagacccgcggtatttgcaactactactctttagcaagtaacttctcaaagctcacatatttcgtgtatctgatggagtacagctgcctgaagaccctcgctaaaaaacataagacacgtatttcagcgatcaaaaaaatgtaccagtgtgggtccagttggggtattccgtatgaaacgaaaagttgcaaaaaacgcatgatgattatcaagttctcggatctgaaaaagggggtcgtctatcagaacgccgatattatcaaacatcacattcacttcaccaatcactcgtctctcgaggaccgcctgcgggcgaatcagtgtgaactctgtggcgcaactgatgttccgcttgaagtccaccatatcaataaggtcaaaaacctgaatggtaaagaacagtgggagaaagccatgattgcgcgtaaacggaaaacgctgattgtctgcaaaaattgccatatcgctattcatcacagctga

SEQ ID NO: 266 - DNA, 1833 bp, synthetic construct
  source 1..1833: mol_type = other DNA
atggctagcgcatggagtcatcctcaattcgaaaaatccggaatgaaaccaactatggaaatcttagctagtattaaagagaactctagcaaaaattctgaagaggtgtttacacgcttataccgctaccttctgcgccaggatatttggtttgaagcatataagaacctgtatgcaaattcgggagccgcgacgaacggtgtcgataacgataccgccgacggattctccaaagagaaaattgacaaaatcattgcgtcactggcggacgaaacatataaaccgaagccggcccgtcgcacctatatcaaaaaagcaaatggtaaaatgcgtccgttggggatcccaacgtttaccgataaacttgtccaggaagtcttacgtatggtgatggaagccgtgtatgaaccggtgtttctgaactgttcgcacggctttcgcccgaaacgttcgtgtcacaccgccctgtccactctgaaaaaagaattcacaggtgcaaagtggtttgttgaaggcgatattaaaggctgctttgacaatatcgaccatgcagtactcgtcggcttcattaatcagaaaattaaagatgcgcgcctgattaagctgatctaccggttcctgaaagcaggctttgtggaaaactggcaatataacaacacttacagcggcactccgcagggcgggatcatctctcctcttctggccaatatctatcttcatgagctggacaagttcgtgatgactctgaaatcggaatttgataagccaaatgaaaccgttcgtaccaaagagtacaaccgcttattcacccaacgtgttaaactgaagaaactgattgactgtgcggatggtgaagaaaaacaggatctgctgaaacaatataaacaggttcgtgcggaaatgatgaaaacgccgtacacgcctcaggatgataaaaagatcaagtatatccgttacgctgacgattttctgattgcggttaaagggaaccgtgaagactgcatggaaattaagcgcaaactcgcggaattcattagtgggaccttgaaaatggaactgagcgatgaaaaaacgttaattactcactcctcggagaaagctcgctttcttgggtatgatgtttcaatccgtcgtaacagcagcattaaacctcatggcaaaggtcgccccacgcagcggactctgaacaataaggtagaactgctgattccgaaggacaaaattagtaagttcctgtttagcaagggcatcgtgcgtcaaaaaaagtgtgacgaaatgtttccgatttcccgggtgcccttgcgcaacagcaccgatctggagattatcacgatctttaatgcagagttgcgcggaatctgcaactactactcattggcgtcaaacttcagcgatctcaattattttaactaccttatggagtatagttgcttgaaaaccctggcgaccaaacacaaaacccggatcacaaaaattaaagagaaattcaaagatggtaaaggttcctgggcaatcccatatgaaacaaaaagtggcaaaaaattgatgtattttgccaagtacaccaattgcaagggtgcgaatgccaccgataccgtcacgaaagctgctgtaacgattggctataatcgtaacaccttcgataaacgtctcaatgccgatatctgcgagttatgtggtaaaacgggagcgggcaactacgaaattcaccacattcataaagtaaaagacctcaaaggtaaagaattatgggagcgcgctatgatctctaaaaagcgtaaaaccctggtggtttgccatcaatgtcatcagaatattcatcatccgaaatga

SEQ ID NO: 267 - DNA, 1860 bp, synthetic construct
  source 1..1860: mol_type = other DNA
atggccaaaggcggcagctacattaacagcatcctgctgatggagaatgttaagtatattatgacgaacccagaaatcatcctgaataaccttgtaaaacactcaaaaatttctggttacaaattcgagcgcttgtaccggatcctgttcaacgagcaaatgttttatcaggcctatcagcgcattgcgtccaaaaaaggaaatatgacctcgggtacggacggcaaaacggtggatggtatgtcaattgaacgcattgagcgccttattgcttccctgcgtgatgaaacctataaaccgcatccggcaaaacgcgtgtatatccctaaaaaaaatgggaaaaaacgtccgctgggcattccatcgtttgaagataaacttgttcaggaagttgtccgcatgatcctggaagcagtgtacgaaggttattttgaaagcacatctcacggtttccgcccccgcaaaagttgccagacggccttgacctcgattcgcaacacatttttaggcactaagtggtttattgaaggcgatattaaaggttttttcgacaacatcgatcacaatgtgctgatcgaaactttgcgtgaacggattaaagacgatcgttttctgcgtttaattcgcaagttcctgaacgccgggtatatcgaagactggaagttcaacaatacctattctggtacaccacaagggggcattatctcgccgatcctcgcgaatatctaccttgaccgttttgacaagtacatcgcagagtacatccagaaatttgatacaggtaagacccgtccgaaaaatcgtgagtaccgtatctatagcgatcgtaaacggcgcttactcgcgaagtttaatgccgaaaccgacgcggataaacgtgaagaaatggctcagcgtttaaaggaatattctcgtcttatgtatgaacatccgtctgtggacgaaatgacgcccacctataagcgtatgaaatatgtacgctacgctgatgacttcctgattggagtctgcgggagtaaagcggagtgcgagatcattaaaaacgatattgcgatgttcatgaaagagaagttaaagctggagctgagcgacgagaaaacgttgatcactaatgccaaagatcgggctctgtttctcggttatgaaatcaccgtgcgtcaaagccaatcgactaaacgggataaaaatggcatgctgaaacgcatgttcaatggtaaagtaattctgctgctcccgcgcgaagtcgcgcgcaaacgtctgttatcctataacgcgatgaccatcattcaggtgaacggcaaagaagattggaaaccaaaaagtcgcggcgcaatgaacaactgtaaacctgaagatatcttggctaaagttaactcagagatccgtggtttctacaattattatgctattgcgaacaatattagcacgctgggaaagcgttttggctacgttatgagttatagcttctactgtaccctggcccagaagttaaacatttcctaccccaaagtcattaaaaaatatcgtgaaggcaaagattgtgtaattcgctataccgatgcgaaaggtcgtgaacgctgccgtatgttgtacaatggcggatttcaacagaaagaaccgacggcggatgccaagtgtgacaatcttccgaacccgtttgttatttcatccccgagcctggttgaacgcctgaaagccgaggtgtgtgaattgtgcggcgcaaaagggaaaactgtcatgcatcatgtgcgtacgctcaagaccctgaccgaaaacaccgcgtgggaacgtgcaatgctgcagatgcatcgtaaaagtctggcagtctgccctaactgctacgcacacattcatgacgat

SEQ ID NO: 268 - DNA, 2925 bp, synthetic construct
  source 1..2925: mol_type = other DNA
atgttagaagttaaagtttccaaccggttgacttgtctgaccactatctctggccctgccaatgttgtctgtcccatcgactcaggcatcctgttccaccgttattatgtttttatttctatcaataccccgttacattcaacaccgatgcgcgtgtgttcgttttttaatgcatgcagtaagaaacgtagtaattgctttaaagcggcaattcgtggattttccagcgatctttctagctccgaagataaagatcgcacagtcgttagcgtgagcagcaaagagtgtttcctgccggttccgtcgcgcaaagcggatatgtcgttgtctgtacagtccattccgagcaaactgtcaaataatcacgtggaaggaagcaccgacgtggtcgactcgttacgccaactgaaaccagaaaaagatggtatctacacccgtattaccacccggtttctggccaatcctgagttcctgaaacttgcgtatgctcatatcaaaaataaagaagggaacatgaccagtggtggctctaactcaaacatcattttggatggcatcagccagaagtggtttgaagatactgcccttcgcctgaagaatggcacgtatgagttcagcacctctcgtaaaattaacatcccgaaaaaaggctcgctgaaattgcgccccttaaccattggtaatttgcgtgacaaaattatccagaaagcgattcaactggtgttggaagaaatctatgaaaacaaggaaaaaatctttagtgatgccagccatggatttcgcccgaatcgctcatgccatacggcactgcaacaaattaaaaacgaatggaccgccattccatggtttatctccattgacattaaggatgccttcggaaccattaatcgcgacatcttaatcagttgcctgaaagttaaaatccgtgaccagcgtttgttcgagattttacttaagatgttacaagcggatattatttccattaacggtatctggaaagaattttatggcgtaccgcagggcaatattttatccccgatcctggccaacatctatttccacgacctggatgtttacattgataaaaaaatcattaaccgctacaaaaagggcacaaaagcagcgcgctgtctggattaccagcgtgctgtttcttttactaatgaggaaaaaaaagcaagtctccaaaaacgcaagcagctggctcgtcggaaacgccgtgacgctcataaagctggtcttcgttataccaaaattgatggtagctttattcgtgtaaagtacgtccgctatgcggatgatttcctgatcggggtgcgtggcccgaaaaccttggtcctgaagattttccggtctgtcatcttctttctgaaatcgacactccagcttaacctgaacgaggagaaaagtaaaatcattgatagctttagcaacaagatcagcttcttgggtatgctgattcataacgtgtcaacgaaaaaactgccttttcgcaaaagtcgtgcgttacagaataaaaaacgtaagctgacgcgtgtcctgctgcgcgcggatgcattagaaaatcagcgcactaaaaaactgaaagatgagtgcctgaagttgctccgtaatagttataagtcgtcccgcaaagatcggaagccgttgaaagaagacttcatctctttgattaaaggttctcctgtatttggtgacgttatcaaaaactcaaaccgtgcaatctaccgtgagttcatccaaagccttctcctggtgtccgatattcaggaaaaccataccctcaaagattttctgaacctgtgggaaaaggagctgtcattagacacggaaaagttcaaaaacgagaattctcctacgcgtccgattacgaaaagtgaaaccatccgtcgcattgtagagattctgaaagtgcagcacaaccttccagcacaggaagtgcagtggtttcagctgttcaaaggggcgaacaaagcccgcgggtcggcatggaaaccggtgtggattgacaaattttcactgagcaaaaacgctgtgtccaaactgaaattacctgtgaataatatctatcacgtaaagtataacgtggagaacattcgcctggtcattgaagatcttctgctgcaagcggaacaacgcccgagcaaaacctacattgatcatattccaaacaacaatgcgaaaagtgttcgtcagacgtgggatgaagaaggcgtctttacgtctttgccgccacagattaacagcgatacgtcggaaatctataaacgcttaaaagaagcatccatcattaattcgaaaaaaaagcccatttgtaagaattcgctcctggctgcggaagcgtggctcatcatttcatattacaataccctggcgcacggtctgctcagctactttcgctgcgttgataatttcaatacgatcaaaaaaatcgtcacttaccaccttcgttatagcctgttacacaccttggcgcataaacataagtgtagtatcaagaaggttctggagatctactcgaaagagattaaaaccaatggccgtcagggcaaggtcgtgtcgtttattaactccatcgccgtgacaaaccttaaaaaggactttctcttcaaagacctgcgtaacccgtacagcaacctcacgaaaagttatatttcactccagcggggtgctatttccgccaataagtgcgccgtaaaaaactgcgtggaaacagacaatattgaagtgcatcacgtgcaaaaactgttccggaacattgaccgtactgggaaagtagtgattcagggtattgccaaaaaactgtcaggccgtctggccatggaaagcgcgctgaaacggaaacaaattccgttttgcccaaaacaccataaagattggcataacggggttattagcaaaattgatctggatgaaccctgggtc

SEQ ID NO: 269 - DNA, 2562 bp, synthetic construct
  source 1..2562: mol_type = other DNA
atgcgtgatgttaataatggctggctcgtgcgctatctgcacagcaatactgcttcagcattcttctttctggtgtacctgcacatcggtcgtggcatgtactatgggagctatcgtgcgcctcgtaccctggtatgggctatcggtacggttagcgccccgaaaggccgctactttggtagtgtccctcgccgcctgttcaaatccggtattgatagtattcagttcgaatatcgcatgccattaccgggtatgtggctgattaccctgtcctttggtattgcgggtggtcgttgctctatggtccgtatcctgttcaacctgcagctgacggcatcaggcatctggcatggtaaagataatgaattagatacaatcaaacatcaccgtccgcgtggtaatgatcataaccgttcctgccaccattttgacggcgtattacgtgttatttggctggcgcatggcgagacgaccaccccctcagcaacatcccgtcgcttcaactgctgtaagtgcctgaaccaaaaagtcaccaatcttagcctgcttcgggatcgtacggcatatgcaattggcacgcgtcgtcgctcttttcatacgcgtggtcgcgtcgaacggccacagcaggactccaaaggctcctcttttaatcaggagattctggaaacgaaagtgctcgagcagcgcaaggcggcgggcctcaccagcagtaaagtacgcaaaggcgggaaacgcgcagcgctcgtgacactggtgcgcaaagaacttcaattgtacctggataaacgcggatcgtataatggcctgatcaatattctgaaaaacccggagtaccttgtagcttgttatgagtcaattcgcggcaaaccgggaaacatgactaaaggttccaccaaggaaacgttagatggtttaacttgggaatggtttgtcaaacttggtgaatcattagccaaaggcaagtttgactttaccccagcacgtcgcgtcatgattccgaaagctaatggaaaactgcgtccgctgggcattaattcgccgcgcgaaaaaatcgtccagaaagccctggcggttattatggagcagatttgggaacgcatttttctgaactcgtctcacggctttcgcccgaaccgttccatccattctgcactgaaagaattatatttggaagggggtaactacaactgggtaattcagggggacattgaaaaatgctttgatgccatcccacacagtgtcatcatgaaccgtgtacagaaaattatcaagtgcaaacgcacgctcgagctgattaaaaagtcgctcgatgccggctacatcgatcccgatactaaaaaaacggtgaatagtgatctgggaactccgcaaggaagcgtgctgtcgcccttgctgtgtaatattgtgttacatgacttcgatgcgttcatgtcatcgatgcgcgaagaatataactttggtgaaaaacgtcgtccaaaccccgattacgtgaaactgaatagtaaacgtcggtatatccgcgatattcgggaacggcgtaaaattcttcgtgaaatgcgtcagctgctggctagcgatcctatggacccgaatttcaaacggctgaagtatatccgttatgctgatgattttgttatcttaatcatcggcccgctcggcgatgcggaaaagatcaaagaacggattcgtgacttcttattgaacaaatgtgggctgaccctgtcgctggagaagacggtgattagtaatatccagaccgaaggttttaagtttctgggtgcggaatgtcgtcgcgccagcatgaccaaaaatcacgttgtgaaacataaagaccgtacgatccgtgcgacaacccgtctgcgcgttaacattgatctcactaaggtctacaagaagttggtgagcattaaagttgcgacctgggataacaaaaatttgcaggtgccgcgcggtaccgcgaacaacgccttgattaacttctctcatgccgaaatcatttcttggtacaacagcaagatccaggggatccaaaatttctacagcttcgctggcaatcgtaaacgtctgcacttggtgttttggattctggcttcgtcttgcgcactgacattagccaagaaacataaaatgagcagcatgggccaaatcttcaaaaaatttgggcgcaatcttacctgcccagagacagacgttagtctcgttcgcccgtccgcgttagaagccattcatgattacaagtctaacaatgtaccggataaccttgactttctggacgtgacctgggccgccaaacttactgagtcaaacattgggaaaagttgctttttatgtggctccaccaaagacatcgagatgcatcacttgaaaagcgttaaagacgtgaaacaaaagatccgcaacggaaacgcctcgttctcggcgtggaaaggcgcatttttgcgtaagcagatccctctgtgtagctatcaccacgatctttatcatgggggcaaactgaactatgcggatttgaaacaaattagtagcttcaccaaactgcctgacagcccgtcagacaacaaa

SEQ ID NO: 270 - DNA, 1737 bp, synthetic construct
  source 1..1737: mol_type = other DNA
atgaaagaaaaggaagatcgcaaactcttgtccagcaaagatattattagtaaagatattacgtatgagctcctggcaatcatcaagaataaaggcaacaatcggtacggttatcttctgaaattcattagtaacgtcgacgtgttactgtcatcctttgaacatattgtacgtaaagatggttattactcgaagggttctgacaaacagattttaagtaacgttgacattaagtacttcgagaatctttcgcgcgaactgaacagcggatcctataaaccgaatccgtcgcgtcgtgtttatatttctaaacctgatggcagcaaacgcccattaggcatcagctgctctcgtgataaaattgtacaacaagcatgtatgattgccctgtcgtatatctatgagagtatttttttagaaaactcacatggctttcgtccatacaagtcatgtcacacggccatcaactactttaaacttcacttcacgagcaccaagtggatcctgaacattgacctcaagggatgcttcgataatatcaatcaccagaaattgatctcgattatcaatgagaacgttgacgataaaggctttgaaattctgtattggaaaatggtgacagcgggttatatctatcgtggtacccactttaaaaccattgaaaaaggaactccccaagggtcaattctgtctccgattctgtgcaatatctttctgaacaagctggatatctatcttctggacttgaaaaatgaatttgacaaagggaccgaaaaacgcaaaaacaaaagttatcgtaagctggctgtcaaagaagcacgtaaacagttcattacctctcgtgatcagatggataccaactttaaacgccttaactttgttcgctatgcggatgatttcattatcggcattgatggtagtttgagcgacgcgcagctgattggggcgaaagtcgaaaaatttcttaaaggagagctgctgtttgaaatcaaacgcttcaccattaaaaacttttgtcaggaaggtgataactttctcggcttcacgctgaaagggtggacgactaagagtcgtaaaattatcaatacgaaaaaaggcaaacaattggtgaaccatcgcccaaaggtcctgattccgactacgaagattctgaacaaattgcatgaaattggcctcgttaagaaatacagcaaccattttcgtgggaccgcctaccggaaactggtagagcatccgttatacaatattgtggagtattttaattcagtgtatcgcggcatcgcgaattactactgcatcgcctacaatattaacaccctgcgcaacctgaattacattttaaaagtgtcatgctgcctcacaatcgctctgaaaatgaaattattcactgttagcaaggtgctgaaaaagtatggtcggaatgtgacaatcaatgaaaacgatagcaccatcaagttcatttcctaccgtaaactgaagaaaccgtatttcaaaagcatcgaaccgttcaatttggacaacatcatcaaattttttagctatggcttgcggagcaaacttaaaaccaacaaaggctgtgaaaactgtggttcgtccctcaacctgtctctgcaccacttcaatcccgtacgcaatatcaaccctaagctgaaaacattagagaaaatcaaaattaaagtcggtcgccagcagattctgctgtgccgtgaatgtcataataaactgcattccgctaaa

SEQ ID NO: 271 - DNA, 2502 bp, synthetic construct
  source 1..2502: mol_type = other DNA
atgcggaaacataaacgcatccacttcggtgtgttcctcaacatccggagcttaatgatttgcgagtcgagcttattagcaatcacgatgcttctgaccgaccgccgtgcgacggttcggtttctgtggaaattgcgtttgcttattaaccataaccttctgaacagcggtatgtttcaaaataccgaaatcctcacatggcactactcctcaaccgatgctggtgataatagcctgtaccttacaggcgtgagcgatcttgggactgtgaaagcctacccgctgcgtaaagtgaccaatcaggtccagtgggtcattcgcgaaggggaaaccctcgctggtccagtggatcgttcaagcatgccgacgttaacaagctgccaggcgttagcgattcatctggagacagagtcttttgatgctgatcttcccattcctaaggttgaccagctggtgtttaacaaaaaatcgtccgaggcaaagccacacctctcgtttatgccgagcattgcaattcccgttaacctgcaaaaccacaaaaaaaagatgcgccgcgggcgtggcgccgttgtacccaatacgatgggccgtgctctgtgcggcctgagctttacccaggatcgttcgctgtctaccaaaacctttcaaagtgacgtctctcagggtcggatcccaaatactatgattaaacgcctcgaaacgctgtctaagctttttacccacaatcctgacgcccaggcagatggattgatgcgtattctcaaagattcccaaatttgggttgcggcctacatcaaactgaaaaccaacccaggcagcatgactgaaggtggtgataaaggtacaatcgatggtacgtcgctgaaacgtctgctgatgttacgcgatagtgtcctggacaacacgtatttgacgggtcgtgcccgtcgtaaaaacattccgaaaccgcagggcgggacccgcccgctgggtattccgacctttcgcgatcgcatcgtacaagaagtgattcgttctatcttggaaactatctacgaaccggtttttcataaaacaagccatgggtttcgtccaggcctgtcacagcacacagccctgcgcgatattcgcaaaaacttccgtggcgcgtcttggttcgtcgaaggcgatatctctaagtgttttgataaagtggatcataccattctgatccgcctgctgcgcaaacggattgctgacgagaagtttctgagtttaattaaaaagatcctggtgaacatcgtaaaagaggaagataacaccgaaacggtatcgatcatcggcaccccgcagggcggcatttgctctccgctgctgtccaatgtctatctccatgaattcgatttgttcatggagaatcttaaggaaaattacgacaccggtactcatcgccgtcgtaatccggagtatgatcgccgttaccgcaaaggtggcgttcaagaagcacgtaaagtgtcctacggagccccgaatgacccgtattttcgtcgtttaggttacgtccgttatgccgacgattttctgatcgggattattggccccattcgggaagcgcgtgaaattcgtgagcaaattcgccagttcctgaaagacacgctgaacctggaactgaacatggaaaaaacgaagattagcaacccgagttcacataaaatcaagtttctgggttatgttctgggtaaaagtggccgcaatgcgtatacatatattcgtaagtatcagggtaccaaacgtaaaatccgcgttatccgtggcggatcgccgtatctgaaagtcgacacccagaaagtaattaaagccctcgcacagaaaggcttctgtgatggcaaaggttttcctaaacctaatttctattatctgccagagccgcaaacgaccgtgattcggaaatacactcagatcttacgcggtttagaacgttactaccatctggcggacaacaagcggcaggccatctccaagttcaattatatcttgcgctatagcgcggcgaaactgttcgcggcgaagtacaaactgaaaagtatgagcaaagtatttgcactcggcggcaaagacctttcaaagcccattaaaagtaaaaatgcgattggcattacggactcagccttggcggaaatggaagagactgtgaccaataaaccgtcacgtcgtcgcacccaaactctgaaaggcttgccttttaccaagtatagcactatcagtaaaccggacattggagtgttcacgaagtataagaacaatcacccgttctcgaatcctctggaatccttaacctggcgcacgattcgcggggtggatgctttcaaactgccatgcgcgatttgtggagctgaaaacaacgttgaaatgcaccatatccgtcagcttaaaaacctgaaagggaaagatttgatcgaaaaaaagatgatttccgcaatgcgcaaacagattccgttatgtcgtaaacatcatttggcagcccacggaaaaaaaatgtataaa

SEQ ID NO: 272 - DNA, 2475 bp, synthetic construct
  source 1..2475: mol_type = other DNA
atgcatattattcaggatttggaagatcgtcataaccacctgaacaataccaacttgaaaagctctatctccatgtggtatgaacgctggttcttatctaccaacgccaaggacattggcaccctgtacctgatgtttgctctgttctctggcttattaggaactgcttttagcgtactggtgcgtcgctgcgccaagctgttattaaacgatccgtttatccttcacagctcgaatatgttgacgaccagtggcctggttgggctcgaacgtgtgcccatgaatattgcatgtctttctaaagcattaagcatctggaaccaggtgtgggaaagcatgcgtgtggtggtccccatggttaaaacgaccctgttcaaactctatctgaaaggtaccagccggaaaggctccaaactggcgtggaaccggttatgcatcctgatcgagattatgtacgtgcgcattttaatccgctgtaacattacccagatcacctgcagcaataaacgcgaagaaggtgaaccgaaaggaactattggcaataactatgaactgcgcgatcatctccgtgggcgctcgtcactgctgtatggcgatggggatttcgtcgtgggtggtaaaaccccgaaaggcgtccgtatgtttagctcgaaaggcgtgaaagaaggttctggggtgcgtccggacctgaaccaatccgaattgccaaataagtttacgaaacttatcgatatctcctcaaacaaagtaaacaacatgaagttcaacgacctgtatacgctgatgttcaacatgaagatgtacgaggtcgcctaccacaaactgaaatcaaaccctggcaatatgtcgcctgggattgaccaaatcaccttagatggcatcagtcaggaagtatttcaaaacatcatcctgaccatgaaggatgagagctttaagttcaaaccaggtcgtcgcgttgatattcctaaagctaatggaaaaacacgtcctttaactgtcgcaagcccacgtgataaaattgttcaggaagtgatgcgcatgattctcgaagccgtctttgaaccgacttttagtaacaattctcatggtttccgtccgaatcgttcgtgtcattcggcactgcgtcaagtcaaaacacagtttggtggcgcgagtttttttattgagggtgacatctcgaagtgcttcgattctttcgaccacgataaactgattgagttaattcgggaacgcattagcgacgaacgctttattcgtctgatctggaaatcgttgaaagccggctatgtacagtttcatcgtacgaaactctcaattattgggacgccgcaaggttccatcatcagcccgattctgagcaacatctaccttaataaactggacctgttcatggacaaacttaaagacgatttcgatcaaggcaaaagtgccaaaattaatccaatctacaaaagtctggactattatcgtcaaaaagcgctcaaagcgaatgaccagctgggtgcgctgaaatatctgaaagagatgcagaaaattcgcgcgcgccttccgaaagatgataattttaaacgcttgtattacgtgcgttatgcggatgactggatcatggccatccgcggaccgctctcagagacgactcggatcttggagagcacccgcgaattcttgcgcaaggagctcaacctggatctttcgaaagaaaagacgctcatcacaaacccccataaagataccgcgatgttcctgggcacccagattcgtatttctaatcacacatatttttatcgcggaccaaacggccagaccatccgtgcggtatctcagttaatttttaccgccccgattgatcgtatccagaagaaactggcagatgcaggtttttgggataacgcgaataaacgctccgtgccgcggatgctttggtaccacgagaataaagacgcgattatcatcctgtacaatagtgtcattcgcggctatctgaattactactcttttgtttcaaacttcggtcgtctggctgcgactgttgaatggattctcaaatcaagttgcacgcaattgttagccgcgaagtttaaactggggacgacactgaaagttattgacaagtttggcgaagacctgaaaggctcggacaatatcgcactgttgaagcctagctatcggaagaatacctgggatttcaagctgaacaacagctacgtgaacctgaaggcgctgtatgctaaaggtattagcaaagcctcactggatggtctggtatgctccaagtgtgaaagtgatgttcaggttgaaatgcaccatattcgtaaacttgctgatttgaatccgaaacttagcgaaattgatcgtattatggcatccaaaaaacgcaaacagattccgttgtgtcgtgcctgccacattgatcatcataaacgctcctttctggatcgtactcgttccaagagtctgattcgcaaaatcattaaa

SEQ ID NO: 273 - DNA, 2082 bp, synthetic construct
  source 1..2082: mol_type = other DNA
atgcgcgttgaaaaaaaccaatatcaggagctctcgctgacggccattatcattcgtgacgtcattagtatgactaaaggcgttttacgtgtgaatatcccggttgtcactgtcaccgtcgggttacccaaaagtcgtaaacgctatggtaatggtggcttaattgtagcaggcatcaaaacgcaagtgttttcgaatacgtcaaaggttatgttccgtgagtgcgaagtaacccagcgccgcggtttaacgacatcgaatctcgttatgggtcataagaaattagtacaggaccttaacaataacttctacaaagacaaaatctgcaacccaacgaagctgatccaagcctatgaattggtgtcgagcaataaaggctccaacaccaaaggtatcgatagcgaaacactggacagctactccaaggacactattcactcagtatccaaaagtttgaaagatcactcgttcaagtttaaacccattcgtcgcgtcgaaattgccaaaagcaacggcggatcacgtaaactgggtatcccttcaccgcgcgataaagttgtgcagaaagttatggccatggcgttggaagagatctatgagccaaagtttagcaacagttcccacggctttcgtcctaaacgtggaacccattccgctctgaaaagcgtcacccggtggtctggtacgaagtggttcattgaaggggacatctcaacttgctttgataccctcgaccatcatatcctcgaaacgctgctgaagaaagaaattagttcgaaaccgttcatcgatctgtactggaaggccgtgaaaagtcactatattaatcccgtcaataaggtagaagaattctctaacgtgggggtaccgcaagggggcgtactgtctccgattttatccaatatctaccttcatgagctcgataagttcatgcagacgaaaattgaggaaagtaagaagtcgggtccgaccagcatcgacaatccgcattacaagaaggtgcataccaaaattagcaacatgcgtcagtacttttctccaacctatcgccgtaatcgctctctgaccaaggaacaggagcaggaacgtctgaaagaaattctgaaattggagaaagtgcgcaccaaactgagctcgacaattcaaggcccgggctatcgcgtttattacgtccgttacgccgatgattttctgattggaatcaatggtccgcggcgtattggtgaaaaattaaaacaggaactgcaaaccttcctgctgaacgaactgaaactcacacttaacctggagaaaactaaagttactcgcagcgatcatggtgcttgttttctgggggcgcgcctgaaacgtcacgcatcccgcaccaatgatcagaaacgccgtacgtcatccgtgacgcgcacaggtcgtaaagtgcgtgcgcgtgtgccacagggaaatatcatcgcgttagcgccgctggaacaccttattcggaaactgcaatcccagggcatctgcaaaactcgcaacctgaaaaaacacgacgtgattcctacccgtaaaaccgcttggaccaacctgaatctcgtgaccatcgtccagaaatataacaacgtgtggcagggcctgttgaactattacagctttgcgtacaatcgttgtcaattgaactggattcagtatctgttacatcacagcctggcatgtacctttatgaataagctgaaactgaactcacgtcgccaggtcttcaaaaaatacggcaaaaccattcaggtgaaagatgaatctggcaaacttgttgcgttcaaacttgtgaaaagtcttccgcgcattgggaaattttcgaacaagattctgcctagcggctttgagacgtttaagtatagcttgcgcacacaaagcgtttttgataaagcttgcaaaatttgtggaaccaaacgtaacgttgaaatgcatcatcggcggccgctgaaagcacataaaacggataacactttgaaatctattcaaatcaaccagtctcgtaaacagattccattgtgtgcaagttgccaccagcgtgtgcataatggtctgtatgatggcccgggcatctat

SEQ ID NO: 274 - DNA, 1803 bp, synthetic construct
  source 1..1803: mol_type = other DNA
atgcaggaaatcgagacagtattgaacgtaattcagaaccgtggcaaacagggtaaaagtctggaacgcctgtaccgccagttgttcaaagaagagctgtacgaaaaagcctacgccgaaatccatgcaaacgaaggggcgattacgaaaggtagtagcaacgatacgctggatggaatgtcccaaaagcgtatcgcggaaatcattcaaaaagtgcgtaccaccacataccgctggaatccggtacgtcgcacctatattacgaacgaagatggacgcaaacggccgctgggtattccgtctggggatgacaaactgttgcaggctgcgatgaaactgcttttggaagcatattatgagccacagttcagtaaacgctcgcatggtttccgcccgggccgtggctgccataccgccttaaaacaaatccgcgaatcccatcgtgacacatcctggttcattgaaggcgatattaaaggctgttttgataatatcgaccacgaaactctgctcggcatcatggaagagaaaatccgggaccagcgttttcttaacctggtggaataccttatgaaagcggggtacatggaagattggaagtggtatggaacctattcaggtacgcctcagggcggcatcatcagcccccttttggcaaatgtctatttggacacttttgataagtgggtggaagaggagttgctgcctcactataactttggtagtcagaaggagaaaggccgtaaacgtaatccggaatatcgtcattatgaatataaacgtagccaagctaagaaaatgggcgatgttgaggcgtatgagcgctacgggaaaatgatgaagaacgtcccgtcgattatcgatgacgatagctaccgcaaacttgaatacattcgctatgccgacgactttctgctgtcttttgccggacccaaaaaggaagcagaagagattcgcgagcggatctctgagtatctggaacgcgaactgaacctcgagctctcaatcgaaaaaaccttaattacgcacgcgcggaatgataaagctcgttttctgggttatgatctgtgcgtcatgcagtctgatgaacgccgtacggcgaacggtacgatctggctcggagttcctcgtgaagtgcgccgtaaagcaatgcgcaagtacacgaagaaaggtaaagccgtgcatcgcccagaattactgttaaactcagactatgatattgttgcgcgttttcaggcggaatatcgtggcctggttcagtattaccagatggcccataacgtacaccgcttacaagaagtagagtgggtgaccgggacctcactcctgaaaacgctggctggcaaacacaaaacctcggtcaataagattgtcaaaaaacacaagagcacccgtactgttaatggtaaaacctacaaagtcttcgaagcgcgcgcagaacgtaaagggaaagagccgttaaccactcattacggcgccgttccactgatccggaaaccagaagcttccattacagatcgtattgttaccctgggcaaaggtcgggtggaactcttacaacgtctgagcaacgatgaatgtgaaatgtgcggcgagaaaggtaacattgaagtccatcacgtgcgtaaacttcgtgatgtgaataaaccgggccgcaaaaataagccggcatgggtgcaccgcatgagcgcgctgcgtcgtaaaactctgatgacctgcgttaattgtcatgacgctattcatgccggtaaacatcgctcggagtgggacaattggaagattgtgctggaaagccgtgtgcgc

SEQ ID NO: 275 - DNA, 1773 bp, synthetic construct
  source 1..1773: mol_type = other DNA
atgcagagtgccgaggtggtgcttggtgtattacgtgaacgtggccgtaagggattaccttgtgaacaactgtatcgccagatgttcaataaagacttgtacctgctggcctatgggaacatctactcgaacagcggcgcgatgacaccaggtgcttcagaagaaaccgctgatggcatgagtgaagaaaaaattgaacaaattgttgaagcgatgcgttgcgaacgttatcgctttgcgcccgctcgtcgcacctatattccgaagaaaaatggaaaactgcgccccctcgggctgccatcctggtctgacaaactggttggcgaggtggtacgcttactcctggaagcgtactatgagccgggtttttctgatctttcgcatggttttcgtaaacgccgtggttgccataccgccctgcggaaggttcacgatacgtggaccggcaccgtgtggtttattgaaggcgatatcagtgattgcttcggcagcctgtcccatgaaattctgctggggatcttggctgaaaaaatccacgaccaacgttttctgcgtttgatccgcaacatgctgaaagcaggctatcttgaagattgggaataccgcgaaacgctgagtggctgcccgcagggtggtgttgtgagccctattttgtctaatatctatcttcataaactggatgagttcgttgagcaggagctcatcccgcagtatacacgtggtacgggccgcaaagtaaacccagtctataaacgtctgcatcgtcatatgacctcggcacgcctgcgcggggaccgggcagctgtccgggatctgaaaaaacagctccgcgcaatcccgtatggggatcctatggatccgggttaccgccgcttaaagtatattcggtacgccgatgatcacattttaggtttcattggcccaaaagccgaggcggaacaaattaaagcacggctggcgaagttcttacgcgagacgctgggtctggagttgaaccagcaaaaaaccctgatcactcacgcacgctcccaaccggcccgttttctgggttaccacgtgcgtgtgcagcattgtaacaccaaaattaccggcggccagcgtagcgccaacgggaatatcgcactgcgcgtgccgccggacgtgatccgttctcagtgcgcccgctaccggaaacatggtaaaccttggtatcgctcccgtctgcagaaccttgacgattatgacatcgtccgtacatacggcgccgagtaccgtggcgttattaattactatttgttagcccaggatgtgtcacgcctgcatgaccttcagtggaatgcggaaacatcgatgctgaaaaccctggcattaaagcaccgttcaactgtaagcaagatggcggcgcgttataaagcgaaaatcgaaactagcgatggcctgcgtacgtgttttgaagcgcgtaaacatcgcgaaggccgcaaagaccttgtcgcacgttttgggggtattattttgcgccagaatcgtcgtgcggtcattacggatcctgctagcggtccgccgctctacccccgtaaagagctcacccggcgtttacgtaagcgcgaatgtgaattgtgcgaaactggaacgacggttgcggttcaccaagtcactggtctgaaagatctgggaaaaccgggcgctggacagccggcttgggccaccctgatggccaagatgcgccgtaaaaccctcattgtatgcgcgccatgtcatgactggattcatgccaacccggtggcgcacgcagcg

SEQ ID NO: 276 - DNA, 1782 bp, synthetic construct
  source 1..1782: mol_type = other DNA
atgaaacctactagcgaaatcctggaacgtatgaatcgcaactctggcgaacatccggaaggcgtgtacacccgtctctatcgttatcttttgcgcgaagatatctacatgacagcgtacaataatctgtatgccaacaatggcgcgggtaccaaaggcgtcgatgacgacacggccgatggtttcagcgttgaatacgttcagcagattatcgcagagctgaaagcgttaaactacagccccaaaccggttcgccgtacctaccttaaaaagaaaaatggaaaacttcgccccttaggtattccgtcttttaaagataaactggtgcaagacgcggtgcgccaaatccttgaatccatctatgaaccaattttttccgatttttcgcatggttttcgtccagatcgttcgtgtcacacggcactgaaacaagcgtccaagtattttcgcggcacgaagtggtttattgaaggggacattaaaggatgcttcgacaacattgatcatacagtattacttaacctgttgagtgagaagatcaaagactccaaatttgtaactttaattgggaagttcttaaaagcaggatatatggagtcatgggaatatcataaaacctactcgggtacgccgcagggcggcattttgagcccgatcctggctaacatctatttccacgaattggataagaaagtggaacagctgcgtgccgattttagtcaaccaaatcctaaaagttgttccctggaatatggtcgcattcgtcgggaaatcttgaaaaaacgcaaacagtatggtgaattgactgatgatacgcagaaaaaatcattactgcgcgagatccataaactggaaaccgagatgcgtaaactgccttataaagacgcaactggccgcaaaattgtatatgttcgttatgctgatgactttctgatcggcgtttctggctcacgcaaagattgcgaaaaaatcaagcaggagctgaccgcctttattagcgagaagttaaaattggagctcagcgatgaaaaaacgcgtatcacccacagcagcgaaaacgctcgttttctgggttacgacatcaatgtgcggcgtaacaaccaaacgaaacgtaccgcgaaaggcaccgtgcaacgtaccctgaaccagagcgtggaactgctggtaccgtttgaaaaaattgagcaattcatgtatcagcgtgaaattgtgatccaagccaaggacggatcgctgattccgtggcagcgcgacgccatggcggggctgaccgatctggaagttctggatacatacaactctcagacccgcggtatttgcaactactactctttagcaagtaacttctcaaagctcacatatttcgtgtatctgatggagtacagctgcctgaagaccctcgctaaaaaacataagacacgtatttcagcgatcaaaaaaatgtaccagtgtgggtccagttggggtattccgtatgaaacgaaaagttgcaaaaaacgcatgatgattatcaagttctcggatctgaaaaagggggtcgtctatcagaacgccgatattatcaaacatcacattcacttcaccaatcactcgtctctcgaggaccgcctgcgggcgaatcagtgtgaactctgtggcgcaactgatgttccgcttgaagtccaccatatcaataaggtcaaaaacctgaatggtaaagaacagtgggagaaagccatgattgcgcgtaaacggaaaacgctgattgtctgcaaaaattgccatatcgctattcatcacagc

SEQ ID NO: 277 - DNA, 1788 bp, synthetic construct
  source 1..1788: mol_type = other DNA
atgaaaccaactatggaaatcttagctagtattaaagagaactctagcaaaaattctgaagaggtgtttacacgcttataccgctaccttctgcgccaggatatttggtttgaagcatataagaacctgtatgcaaattcgggagccgcgacgaacggtgtcgataacgataccgccgacggattctccaaagagaaaattgacaaaatcattgcgtcactggcggacgaaacatataaaccgaagccggcccgtcgcacctatatcaaaaaagcaaatggtaaaatgcgtccgttggggatcccaacgtttaccgataaacttgtccaggaagtcttacgtatggtgatggaagccgtgtatgaaccggtgtttctgaactgttcgcacggctttcgcccgaaacgttcgtgtcacaccgccctgtccactctgaaaaaagaattcacaggtgcaaagtggtttgttgaaggcgatattaaaggctgctttgacaatatcgaccatgcagtactcgtcggcttcattaatcagaaaattaaagatgcgcgcctgattaagctgatctaccggttcctgaaagcaggctttgtggaaaactggcaatataacaacacttacagcggcactccgcagggcgggatcatctctcctcttctggccaatatctatcttcatgagctggacaagttcgtgatgactctgaaatcggaatttgataagccaaatgaaaccgttcgtaccaaagagtacaaccgcttattcacccaacgtgttaaactgaagaaactgattgactgtgcggatggtgaagaaaaacaggatctgctgaaacaatataaacaggttcgtgcggaaatgatgaaaacgccgtacacgcctcaggatgataaaaagatcaagtatatccgttacgctgacgattttctgattgcggttaaagggaaccgtgaagactgcatggaaattaagcgcaaactcgcggaattcattagtgggaccttgaaaatggaactgagcgatgaaaaaacgttaattactcactcctcggagaaagctcgctttcttgggtatgatgtttcaatccgtcgtaacagcagcattaaacctcatggcaaaggtcgccccacgcagcggactctgaacaataaggtagaactgctgattccgaaggacaaaattagtaagttcctgtttagcaagggcatcgtgcgtcaaaaaaagtgtgacgaaatgtttccgatttcccgggtgcccttgcgcaacagcaccgatctggagattatcacgatctttaatgcagagttgcgcggaatctgcaactactactcattggcgtcaaacttcagcgatctcaattattttaactaccttatggagtatagttgcttgaaaaccctggcgaccaaacacaaaacccggatcacaaaaattaaagagaaattcaaagatggtaaaggttcctgggcaatcccatatgaaacaaaaagtggcaaaaaattgatgtattttgccaagtacaccaattgcaagggtgcgaatgccaccgataccgtcacgaaagctgctgtaacgattggctataatcgtaacaccttcgataaacgtctcaatgccgatatctgcgagttatgtggtaaaacgggagcgggcaactacgaaattcaccacattcataaagtaaaagacctcaaaggtaaagaattatgggagcgcgctatgatctctaaaaagcgtaaaaccctggtggtttgccatcaatgtcatcagaatattcatcatccgaaa

SEQ ID NO: 278 - DNA, 1749 bp, synthetic construct
  source 1..1749: mol_type = other DNA
atggctagcgcatggagtcatcctcaattcgaaaaatccggaatggattatacggaatcggattttgacgccgcatccccggatgaagtatcagagtggcatagtattgattggaaagctgtgcagtactttgtgggaaaagaacagagcaaaatcgctcaagccgagcaagccaaggacttccgtcgtgtgaaacgtttgcagcgcaatcttacacgttcttggcaggcaaaagctcttgctgtgcgcaaagtgacagaaaatcaggggaaacgcacttctggtgttgatcgtgaactgtgggatacgccccaaaaaaaatggattgcggtaagccgtctcaacctgcatggttaccgcgcactgccactgaaacgcgtctggatccctaaagccgacggcaaagaacggccgctcggcatcccgaccatgcgtgatcgtgcaatgcaggccttatgcttattggccatggaaccggcagcagagtgtcatgccgacccaaactcatatggctttcgcaaaggtcgcagtacccatgacgcacgccaacagctcttcgtgtgcctgagcaaaaaagtgtcggcgcaatgggtgcttgatgccgatattactggctttttcgataatattaatcacgactggttacttgctaacgtacgtatgaaccgtcgtgtcctgggacagtggctgcgctgtggcgtagttgataaacagcagctgcaaaaaaccgaggcgggtaccccgcaagggggcattattagcccgttgctggcgaatctgactctggatggtttagaggccggactgatgcgtttcctcaaggatcagctgggctttgaaaaagcaaaaaaggcgaaagtccaccttgtgcgttacgctgacgattttgtagttacgggtgacagtaaagaagttcttgagacggttgttcgtccctgggttgaagcctttttacgtgaacggggtctgcaactgcacaccggcaaaacccggatcgttcacatcaacgaaggtttcgactttttgggctggaacttccgcaagtattctgaaaccttgctgattaaaccgagccataagaacgtcaaagcgttttattccaaagtccgcgaggtgattgcaggccatctgtcccagccgaaggaagtactgattgctaaactgaacccgattttgcgcggctgggcgcgttatcaccagggagttgtcgcgaaagcgacctttacgaaacttgatcatcagatcctgtggcgtctgcggcgctggggtatgcgtcggcacccacgctggacacggggtaaagtgttcaaacattactggacccacactagcgggcgttgggaattcgaagccaaaacgcgtaatcgttgggacgaggaaatgcagttacgcttatacactctggcggatacaaaaatcgtgcgtcacaaaaaggtaatcggcgaatatcatccatacgaccctgcgtgggaagcgtatggggaaggactgaagcgtaatcgtatggtgcagtccgtctggtcgggtcagcgcttggagctctggatgacccaaaatggcaagtgcgcgcactgtggcaccgatatggaccatgaggattcagggttagataaccatcatattgttccggtgcgctggggtggcacggattcgctgagtaaccgcgttctgctgcatccctggtgccaccgtcgcatccatgcgctcggtctggaagtcgcgaagcctgtgccggtccgcgggctgtga

SEQ ID NO: 279 - DNA, 1524 bp, synthetic construct
  source 1..1524: mol_type = other DNA
atggctagcgcatggagtcatcctcaattcgaaaaatccggaatgaacgtcgaacagtcgatgtgtgctgcttctggcccggcgatgcagtgggaacaaatcgactggtcgcgctgcgaacagaaggtccgtcgcctgcaggcccgtatcgtcaaagccactcaggaaggtcgtcgtggcaaagtaaaggcgctgcaatggttactgacccatagtttcagcggccgtgccctggccgtaaaacgcgtgacgcataacaaaggtaaaaatacgtcaggtgttgacaaagctatttggcggaccccggcatctcgttataaagcgatcgatacgcttcgtcgtcgtgggtaccaaccgcaaccgttgcgccgtgtgtatatcccaaaagcgaatggtaaacagcgccccttgggcattccgaccatgaaagatcgtgctatgcaggcgttatatcttttagcgctcctgccgattgcggagacaaccggcgatcttaactcctacggttttcgcccggaacgttccaccgcagatgcgattgaacagtgctataaagtggttggaatgcgccattccgcccagtgggtgctcgaaggcgatatccgtgggtgctttgataatatctcacacgaatggatgctggatcatattcctacggacaaagaagtcctgcgtaagtggttaaaaactggctatatggaaaatcgtaaactttttgcaacagaggccggtaccccacagggtggtattattagcccaacgttagcgaacctgaccctcgatgggttagaacgcctgctgaaacagactttccgtaaccgtcaggtaggagaaaagcataatcctaaggtcaacttcgtgcggtacgcggacgattttatcatcacgggaagctcgaaggaattgctggagaacgaagtgaaaccccttgtggaatcattcttgctggaacgcggactgcaactgtctcctgagaaaacctgtattacccacattgaggacggttttgactttctcggccaaaatctccggcgctatggccgtaaggtattgaccaaaccgagtaagaaaaacatgcatgcctttctggagaaagttcgcggtgcaattaaacggaactccacggctcagcaggccaatctgattggcattctgaacccgatcatccgcggctgggccaactaccatcggcacattgctgcaagcagcgcctttggcaaagcagagatggcgatctggcgcagcctgtggtcgtgggcgaaacaccgccactggaagaaaccgactgcctggattgcaaatcgctattggcaccgtctggggaacgggcgccgtatgttcgcagttatggcaggttctaacgcgcccaaaagtcgtgcgatggttgcttggctggtgaatccggcaaaaacaccgatccgccgccatatcaaagttcgtagtaacgcgaatcctttcgatccaaattggcgttcatactacgatgcccgtaaaagtctgaaacgcgcgagcagccaacagtga

SEQ ID NO: 280 - DNA, 1614 bp, synthetic construct
  source 1..1614: mol_type = other DNA
atggctagcgcatggagtcatcctcaattcgaaaaatccggaatgctgaaagaagaacgtcagatgacccagttaggaaattttaagattccaaaaagtggggcttcctcgactaataagctgaactggcaatctattaactgggtgaaagtaaaacgcgacgtgcgccgcctgcagatgcgcattgctaaagccattcgtgaaaaacgttataacaaagcaaaaagtcttcagtgggtgttgacgcattcgctgagcgccaaactcttagctgtaaaacgcgtaacttcgagcagcggctcacgtacagcgggcgtggatggtaaaatttgcgcaagcaacaaggacaaaatgcaactggcgttgtcgctgcgtcgttacggatacaatgcgcagccgctgcgtcgcgactatatcccgaaacgtaacggtaaacagcgccctcttggcattccaaccattaaagaccgtgcgatgcaggccctgtatctgctgggtttggaacctattgctgagacactcgctgatccgaatagctatgattttcgccagcaacggtgcaccgcggatgccattgagcagtgcttcaaagtgctgtctcacaaaacgagtgcccagtggatcctggaagtcgatattgaaaaatgtttcgatcggatcaatcacaattggctgaaagaaaacatcttaatggacgtgtcactgctgaaccaatggctggaaagccgctacatcgagcgtaaacaattacacccaacgctcgccggcaccccgcagggcggtattatttctccgaccctggctaatatgaccctggatggtttagagaaagcaattaagagtgtcgcgaaaccggcatctaaagttcacgtcatccgttatgcggatgattgggttgttaccggcaactcccaggaaattttggaaaacaaagtcatgccggccatcgagaaattcctgaaagttcgcggtcttacgtgctcccgtgagaaaaccaagatcgtccatatcaaggatggctttaactttctgggcttcaatatccgcaagtaccacgacaagctcttaattaaacccgccactaaacacgttcatgcgtttctgaagatggtgcgcaatattaccaaagcatccgtgagcctgccgacggacattctcctgcgcgttttgaacccaaaaatccgtggttggggaaactactatcggcatgttgtgagcaaggatgttttctgttatgtggataactgtatctatcttgcgattgcgcgttgggcacgccgtcggcatccgcaaaaacctgcacattggttacgcaaaaaatattttcgtcagcagggcatgcggaattggatcttctctacgaaagtatacgataaaaaggggaaaatcgtgaatcgtgaccttgtccagctcaagtatcttccgattaagcgtcatcgtaaaattattgccgaagcgacaccgtttaatcccgagtatatcgaatactttttgaaacgcaaaagttaccaggggctgaactggttgtaccgctcactgcaaaaacaggcaaaaagcttttcacgttcggcgaaactgcagaaccaaaattcccgtatcgaacaagaatcatga

SEQ ID NO: 281 - DNA, 1428 bp, synthetic construct
  source 1..1428: mol_type = other DNA
atggctagcgcatggagtcatcctcaattcgaaaaatccggaatgaaactgacctataaacaggctattcgcccgttcgcacgcggcccgccgctgcgtctggtccagtcccattttgcagaactgttcatccgccggcagcaaaatcttttgatgaatttttgctactccgacgaacgccgctggcgcaatattaataaaagtaccgtaccggcggaaattcagcgctggaaagacattgatttccgtaaagcggaaatcaaggtgaaaaaattgcaacgtcgtatcgcttccgcgtgggcgaacaaaaactttaaaactgtcgatacccttcagcataaacttattcactcgttctctgcgaaagcgcttgccgtaaaaacggttgttgataataaaggcagtcgcacccctggcgtcgatggtgtgatctggagcgaccttcgccagaaactggatgccatctatcagttgcgccgtcgtggttataaacccatgccattacgccgtgtttatgtcccgaaaaaggacgggacgctgcgtccacttagcattccgacgatgcgggaccgcgcgatgcagatgctgtgcaagatggcgttagagccaatcgccgaagcaacagccgacaaacgttcgtttgcgtatctgtcgggtcgtggcgcacgtgaggccattatttgtctgaaagttactatgcgtgacaacccccagtttcgctgggttatgaaggctgatgtggcaggctgctttgataatattgatcattcttggctcctggagcacattccgattgatcgtaagattctgtaccggtttctgaagtgcggctatattgaggatagtacattctacccgaccgaacgtggtgtgccacaagggggatgcattagcagcgtgttatgtaacatgacgctggatggattggaaggtttgctgaaacagcagtttgggctgagtgtatgtatgattcgttacgcggatgatatcatcatcatcggtgaaagccgcgagattctggtacaagccgtgactccggtgattgaatcattcctcgcggaacgcgggttagcgctcagcaaaaagaagaccggttattatcctgttaaagcaggcgtgtcttttctcggatggaaaacctaccgtgaccgggatcgcgtcattagcgaaccgtcaaatatcgccgtgaaccgtttaatgaacgagatcgaatctatcgcagccttggcaattgattatcacgctcaatgtgaaaaagtcagcagtaaaattcgtggctggctgaactattaccggggcatcgctcctcgcctgtccctgaacgaagtggagttctacatcgcccagtcgttactgcatatgcaggatgttgaactgctcgctggtgaaattcaatcaatcttttcagagctgctggacacgctgtga

SEQ ID NO: 282 - DNA, 1446 bp, synthetic construct
  source 1..1446: mol_type = other DNA
atggctagcgcatggagtcatcctcaattcgaaaaatccggaatgatccgccatcgtgataactcgagtgaatcgtggaaaacgctgccgtggaaacagctgagccgcaacctttttcgcctgcaacgccgtgtttataaagcggtacaggtgggagataaacgcaaagccaaaagtctgcagaaactgattctcaaatccaccgccgctcggctgctcgctattcgccaggtcacgcaattaaacgccggccagaaaaccgcggggatcgacggtcagacagcgctgacattcgaacagcgttttgaattgagcgagaaactgcgtaccgaggcaaataactggaaacatcaaggattgcgtgaaatccctattcctaagaaagatgggaaaactcgtatcctgaaagtgcccaccatcgcggatcgtgcgtaccagtgcctggtcaagtatgcgttggaaccagcgcatgaagcaaccttccatgctcgttcatatgggttccgtacgggtcgttccgcgcacgatgcacagcgccaactgttcaactcgctgaacagtcaagccaacggcatcgaccagcgggttattgaactggatatcgagaaatgctttgatcgtatcaatcacacagccattatggaccggttaattgctccactgagcattaaacagggcatttttcgttgtctgaaggccggcgttaatcctgaatttccggaactgggaactccgcagggcggtgtcgtgtctccactgcttgccaatattgcgttaaacggcattgaatcgattcatcgttatcatcgtgactcaaacaaacgcattaccgataaaaccagcgcagaaagcattatcgaaccgtctgtgcgttatgctgatgatatggtcattatcttgcgcccgcaggacgatgcaaccgtgattttggacaaaatctctcacttcttagccgagcgtggtatgaaagtatcagaaaaaaagaccctcgttaccgcagcgaccgatggttttgactttctgggctggaactttaaggtacaaaataatggtaagtttaagtgtgtcccgagtgtcgacaattacaaggcctttcggaaaaaagtgaaagcgatcgttaataacagcaactacggggcaacgacgaaagcagagaaactcgctccggttgtacgcggctggcgcaactatcaccgcttctgtaaaatggatggcagccgcttttcactgtggcacattgaacatcgcgcgtttaaagttttcaattctgaaactaagcagaattgccacacgtgcaaacaactgcttaaaaaagccttcccccaagtgccatacagtgagaacaagtatattaatgtgacgggtgaaaaatccccgtacgacggtgatcttacttacggcagcgagcgcaattccccgttagtgatccgccagaaatatctttga

SEQ ID NO: 283 - DNA, 1866 bp, synthetic construct
  source 1..1866: mol_type = other DNA
atggctagcgcatggagtcatcctcaattcgaaaaatccggaatgagcacggcgtcttcccctctggtgtacgaatggaatgatatcccatggcgtagcatcgaacggaaagtattcaaacttcagaaacgcatctatcaggcagcacagcatggcaataaagtggcaatccgtaaactgcagaagctgctgctgtcgtcctggtatgcgaagtgtttggccgtgcgtaaagtcacgcaagaaaataaaggtaaaaaaacagctggggttgacggaaaacttgcactgtccccgaaacagcggatccgtttagtacaaacgctgtccctgaaaccaaagagtacccccgttcggcgtgtatggattccgaaacgtggcagcgatgaaaaacgtccgctgggcatcccgactatcgagaatcgggctcagcaagcactggccaaaatggccttggaaccggaatgggaagcacgctttgaacctaattcttatggctttcgtccgggtcgctcggcgcatgatgccattgaggccattcagcagtctattaagtacacgcagaaattcgtgttagacgccgacattgccaagtgttttgaccgcatcaaccatcaggcgttactggaaaagctggaaacgttcagtgtgatgcgccgcgccgttaaaacgtggttaaaagccaaaattatggatggggatgaactctttccgtcagaggaaggtactccgcaagggggtgtgatttctccattattggctaacattgcgctgcatgggctggagacagcaattaccactgcttttcctaaaacagtaaaaatcgatggcattattcacggccgctatcaaccacgtgtggttcgctatgcagatgactttgttgtcctgcacgctgatttgaaattagtggaaaaagcgaccagtattgcccaggagtggcttagcggcatgggcctcgagctgaaaccaagcaagacccgcattacccacactttcaaaaaacacgaaggaaacgtgggttttgattttctggggtttcatgttcgccagttcaaagttggtaagtgcaattatcgtacctcgggccatagccgtattctcgttgacttcaaagcgatcattaaaccgtccaaggaagcgatcgcgcgtcattaccgccaagtggccgaggtcattgaacgtaacaaaagtgctgagcaggcgaacctgattcggttgctcaacccgaaaatcgttggctggacaaactactattcaaccattgtgtcaaaggcggtcttcagcaagctggatcatcttgtcacgaaaaaacttctccgttgggcaaaacgccgtcatcaacatcagtcacgtcgccagaccgtccgcaagtactggaaattttcagaaaaagggcgtggttggatctttcaggcttcggacattagcattctgcgttggtatgcggacgtgcccattaaacgccacgtgcaggtcgcgggcaccaaaagtccgtttgatggaaactgggtatactggtctaaacgtctccagcactatccgctgttgactttccgccaggcgaaacttttaaaagagcaagagggtaagtgccgttggtgtcgtctgtactttaaacaaggagatcgtatcgaagtcgatcaccgcatcccgcgccgctatggcggtcgtgatgaatacggcaatctgcaaatgctgcacgttcattgccacgatgaaaaaaccgcgatcgatggcaccatcgacagtgttggtcctgattcgattgacgtaaacgattatgtgattgaagaaccgtgcgaagtggagagcttgacccatggtagcgaagatgaagccttcggtcgtcccgacgtcctggtatga

SEQ ID NO: 284 - DNA, 1704 bp, synthetic construct
  source 1..1704: mol_type = other DNA
atggctagcgcatggagtcatcctcaattcgaaaaatccggaatgcagaccatgcgcaacgcgaatgtgaccaaacgcacgacagattggcgctctatcaattggcgtaaagcgtatcggatcgttcgtaatcttcgccaacgtatctttaaagctacgcaaaaaggaaacctgcgtaaggtgcggtcgctgcagaaattgatgatgaagtgttactcaaatattttactcgcagtccgccgcgtcacgcagattaaccgtggcaaaaacactccgggcgttgataaactgattattaaaacaccagaggctcggggtattttggtagataccttatccttattcattccgtggaaaccattaccgacaaaacgtgtgtatattccgaaaagtaacggcaaaaaacgtcctcttggcattagcactattattgatcgctgtatccaagccattgtaaaaaacgcgctggaaccctactgggagagcaagtttgaaattagcagttacgggtttcgtcccggacgttcagcccacgatgcgatcgaaaaaatctatcttaccgcctgtccgcatcgccgtaaaaaatgggtactggacgcggacatcaaaggctgctttgacaacatctctcatgaattcttaatgaaaacgattggaaattttccagcccgtaaactggtgtaccagtggctgaaagctggttatgttgaacaaggtgaatattttcatactagctcgggcaccccgcaggggaatattatttcaccgttgctggccaacattgcgttgcatggcatggaagaagctctgggtattaagtataataaccgcagcgaaattgttggcaatcgtgcattggtgcgttatgcagatgattttgtgattttttgcgaaactaaagaagatgccgaacaagcccagaccgcgctcgagaaatggctgaacttgcgtggcctggagctgagcaaggaaaaaacccgcatcgtccatctgaaagaaggtttcgacttcctgggtttcaatatccgccagtaccaggtcaccaatacgaaaaccgagtggaaactgttaatcaaaccttccaaagagtctatcctcaacatccgtaaaaaactccggcaagaatggcttaacctgaaaggtcataacgtgaactcagttattgagaagctcaacccaatcattcgcggcgaggctaactattttcgcattggcgtggcgtcggaagcattttccgcactggatgattggatgtttaaacgcgaatgcaagtatgtaaaccgtactcacccgaaaaaaaataagcagtggcgtgcgaataagtattgggggaaacttaatctggaacgcaatgataagtgggttttcggggacaagaacaccgggaaacatatcctgaagttctcttggttcaaaatcaagcgtcacaaacttgttgtcggtaaaagttcccccgatgatccggcgctgcgcaagtactgggaagaacgtgaaaaagacaaaacgtcgaatcatcctaagagtatccagaaaattgcaagcaaacagggtcatacctgtccgatttgcggtcagtccctgtacaatggcgaggagatccacaaacaccacaaaacgccgaaaagcaaaggcggaaccgacaactacagtaacctggaactggtgcatctgtattgccaccagcaaattcactcgggtacatga

SEQ ID NO: 285 - DNA, 1716 bp, synthetic construct
  source 1..1716: mol_type = other DNA
atggctagcgcatggagtcatcctcaattcgaaaaatccggaatgaccaaactgaatcagaaatggcacaacattaactggaacaaaacctcgaagtacatcaagaatcttcaggaagaactggtggtagcgtacaagaacaacgatcaaaaactcttattctcattacaggaaaaactgatgatgtcatttgaaggtcgtgctttagctgtacgccagattgttaccaacgatggcaaaaaaacgccagggttcgataagattatctggaattctcctagtgcgaaactgcaggcgattttacaactgcgtgaaatcctcattcagaagtctggtgattaccaaaccggcccggtccgtcgtacttggattccaaaagatcagagcgacgaactgcgtccgctcggtatcccgaatatgattgatcgtggtctgcaggcattggtgctgatgtgcctggatccgattatcgaagaaatgagcgacacctatagttttggctttcgcaaatatcgcaatactggcaatgcgatccagcgcattcgtacaattctggataaaccgaaaggtccgaagtgggtttgggatgccgatattgaaaaatgctttgacaaaatttcccacgaattcttggaaaaagagacgaaacttattgcatgcccaaaggcttacgaatatattatcaagtggttaaaagcgccgatcatcaataaaggcattaagaccttccccagcgatgggacgccgcagggcggcatcctctctcctctgctgtgtaacattgccttaaacggattggagaacgccgtgcgtgatggcctgccctctccgaatagtagtgaaggccgtaaaatttccggttcgtgggttattcgttatgccgacgacttcatcgtaaccagcccgtgtaaagaacggctggtcaaagaacacattcctcgcgtatcgttttttctttcgaaacgtggtttgaacatctcggaaaaaaagtccaaaatccgttctttggaaaacgaaggcttcacatttctgggatgggatgttacactgaaaagccgcagcctcaagcgcaataagagtaaaaccaacaaaaaagtgctgattatccgtcccagcaaaaaaagcatcaaaagtttcaaacgcgagattaaagataagtttcgcagcaataaaccgattcgggcactgatctcagagcttaacccggtgctgcgcggctggacgaactactatcgcgattcgtatcactctcaggaagtttttcaatcaattggacattatattcaccaattgtggtggaaatgggcgcagaaaaaacatccgaagcgcaataaaaattggatctacaatcgttatatcttcaatacggagaagaactcctggcgtatcggggagtccaaagacattatgctgtttgacgtgattcaggcgaaacagcttcggattaaaagcttacgtaataacgtcaacccatatctggatgaggactactacattcagcgcactgtcattcgtgacagcgaaaaatttcgcgttgcaatctacaaaaaacaagattttcggtgctatgtgtgtgagcaatccctgtatgggagtgaggaagtgcatcttcatcatctgattcctcgtaaagatggtggtcaatatactctggaaaacatcgtcccagtgcatgccacctgtcatgagtcaatcacgtatacccgcaaagactga

SEQ ID NO: 286 - DNA, 1542 bp, synthetic construct
  source 1..1542: mol_type = other DNA
atggctagcgcatggagtcatcctcaattcgaaaaatccggaatgtcagtgtccgaacccgaaatcacatcggtcactgaccttaccgataaagaactcacgttacaatggaaaaccatcgactggagtaaagccgaaggtattgtcaataaccttcagagccgtattgcatcagcggcaaaagaaggaaattggaaaaaggtttcgaaactgtctcgtctgctgactcacagttattatgcgcgggctcttgcggtacggaaagtaagcaccaacaaaggtagtcgtacacctggcatcgatggcgtgttatggacctcttctggtgataaaatgcgcgcggttttacaactgaaaagcaaagggtaccacgccaaaccgctgaaacgtaagtacattctgaaaaagaatggtaaactgcgtcccttgtccattccgacgatctacgatcgcgctatgcagactctgcatgctctcgctttaggtccagtggaatcagcgacaagcgataaaacgtcctttggctttaagccttatcgtagcaccaaagatgcatttgcatatcttaatatctgtctgtctaaaaaaaacgcgccgcagtggattgtcgaaggggatatcaaagcctgctatgacgaaatctcccacgagtggatcctggccaacacattgatgaacaagaaagtcctgaaagaatttctgaaatccggatacatcgaaaattatcacctgtttccaaccgagaatggcacgccgcaagggggcactatctcgccgatcatcgcaaacatcgttttgaacggcctggatacgattctcgcggaagtgttctattcttggaacaacggaacgattgacaagaaacatcggaacaaacatcgcgtgaactttgttcgctttgcggatgatttcgtaattaccgctgatagtccggaaaccgcccacaaaattctggacattgtgaaaacgttccttgagccacgcggtctgaccttaagcaaagagaaaaccttggtgacccacatcagcgatggctttaccttcctcggttggaatttccgcaaatacaagggtaaactgctgactaagccgtcgaaagaaagtcagaaagatattatcacgaaaattcatgacgtcatgtataaagcccgtgcccgttctcagagcgagctgattcgcctgttgaaccctattattcgcggctgggcgcaataccataatcatgcgatttcaagcgcaatcttcaaaaagttagatcacattatgttcatcatgctcgttagctgggcgcgtcgtcgccacccgaataaagggtttgcatggattatggccaagtattggcatcgtatcggcaagtggaaacatgccttctcgacagactcacagaccctggagcgcttttcgaatatgaaaattatccgtcatcgtttggctaaactggacaaaaatccgtatattgaccgcgattactttgaacgttggcgggtgatcgagcattatcgcaagaaacagattagctacagtaagagttccctgaactga

SEQ ID NO: 287 - DNA, 1740 bp, synthetic construct
  source 1..1740: mol_type = other DNA
atggctagcgcatggagtcatcctcaattcgaaaaatccggaatgaatgatatcaaaacgagctgcgccagtacagatcgtaaaattgttgcgtgggattcaattgattgggacaagtgcgaatatgaagtgcagaaactgcaagcacgtatcgtcaaagcccaaaaagatggtcgctactgcaaagtaaaggccttacaatggacgctgacccattcattttcagcgaaagctcttgcagtgaaacgcgtgacctctaacaaaggtaaagaaacaagcggtgtagatcgtgttctgtgggattcgccgctgggaaagtggaaagcgattagtaccctgaaacgtcgcggctactgcccattaccgctgaaacgtgtgtatattaaaaaaagcaacggtaaacttcgtccgctgggcatcccgaccatgaaagaccgggcgatgcaagcgttatatctgatggccttggatcccgtggcagagacaacggctgataatcatagctatggctttcgtaaagaacgcagcacagcggatgccattgtacagtgtttcattgtgctgtcacgtacggtcgcaccggaatggatcttggaagcggatatcaaagggtgctttgaccatatttcccatgagtggctgctcaacaatattccgatggaccgggttatgctcaagaaatggttgaagtgcggctttatctttaacaaaatcttaaacccaacggaagaaggaaccccgcaaggcggaattatctcgcctactctggctaatatgaccctggacggtattcagaagcttctgcaggaacgcttcaaaaaacgcaaagttaaaggcgtcgaaatctacccaaaaattcaccttgtccgttatgcggatgatttcattattactgggcgtactaaagaagttctggaaaatgagatcaagcctttaatttgcgagtttctggccgagcgggggttgaccctgtccgaagaaaaaactaaaattacacacattcgcgagggcttcgacttcctgggtttcaacatccgcaagtttaataataccctgctcaccacccccagtgagaaatcgatcgaaaaattcttggagaagattcgcaccattatcgaaacgaagaaatccactaagcaggagagcctcatccgtgtacttaacccgatcattaaaggttggtccaattattatcgcaccggcactgctgcaaaaagttttcagcgcgtcgattgggaaattttccgcaaactttggcagtgggcgcgccgtcgccatagccagaaatgtaaaggctgggtgaaagaaaaatactatcgccgtatcggtaaccaggcgtggtgtttttctgctgaaaaagagatccagaaaaagggcgaactgaaatatgtgcagttggtccacctggcagccgttaaaaccaagaaacacgtgaaaatccgccatgacgcaaacccgtatgacacgaattataagtgttactttgaagaacgtgccacgcgtaaaaaactggaagccttaaaagggaaaagttcctcttggaagtatgcgtgggagctgcagaaacggaagtgtcctatctgcggcgagacgctgaacctgaacaatgactggaaaatttcgaagcaatttgtggatggtaaactcaaagaacgtatctaccatgaagactgttactataacgatgttcacccaaccaaaaaaaagtactacgaaagcgtgtctttacagaaactgtga

SEQ ID NO: 288 - DNA, 1704 bp, synthetic construct
  source 1..1704: mol_type = other DNA
atggattatacggaatcggattttgacgccgcatccccggatgaagtatcagagtggcatagtattgattggaaagctgtgcagtactttgtgggaaaagaacagagcaaaatcgctcaagccgagcaagccaaggacttccgtcgtgtgaaacgtttgcagcgcaatcttacacgttcttggcaggcaaaagctcttgctgtgcgcaaagtgacagaaaatcaggggaaacgcacttctggtgttgatcgtgaactgtgggatacgccccaaaaaaaatggattgcggtaagccgtctcaacctgcatggttaccgcgcactgccactgaaacgcgtctggatccctaaagccgacggcaaagaacggccgctcggcatcccgaccatgcgtgatcgtgcaatgcaggccttatgcttattggccatggaaccggcagcagagtgtcatgccgacccaaactcatatggctttcgcaaaggtcgcagtacccatgacgcacgccaacagctcttcgtgtgcctgagcaaaaaagtgtcggcgcaatgggtgcttgatgccgatattactggctttttcgataatattaatcacgactggttacttgctaacgtacgtatgaaccgtcgtgtcctgggacagtggctgcgctgtggcgtagttgataaacagcagctgcaaaaaaccgaggcgggtaccccgcaagggggcattattagcccgttgctggcgaatctgactctggatggtttagaggccggactgatgcgtttcctcaaggatcagctgggctttgaaaaagcaaaaaaggcgaaagtccaccttgtgcgttacgctgacgattttgtagttacgggtgacagtaaagaagttcttgagacggttgttcgtccctgggttgaagcctttttacgtgaacggggtctgcaactgcacaccggcaaaacccggatcgttcacatcaacgaaggtttcgactttttgggctggaacttccgcaagtattctgaaaccttgctgattaaaccgagccataagaacgtcaaagcgttttattccaaagtccgcgaggtgattgcaggccatctgtcccagccgaaggaagtactgattgctaaactgaacccgattttgcgcggctgggcgcgttatcaccagggagttgtcgcgaaagcgacctttacgaaacttgatcatcagatcctgtggcgtctgcggcgctggggtatgcgtcggcacccacgctggacacggggtaaagtgttcaaacattactggacccacactagcgggcgttgggaattcgaagccaaaacgcgtaatcgttgggacgaggaaatgcagttacgcttatacactctggcggatacaaaaatcgtgcgtcacaaaaaggtaatcggcgaatatcatccatacgaccctgcgtgggaagcgtatggggaaggactgaagcgtaatcgtatggtgcagtccgtctggtcgggtcagcgcttggagctctggatgacccaaaatggcaagtgcgcgcactgtggcaccgatatggaccatgaggattcagggttagataaccatcatattgttccggtgcgctggggtggcacggattcgctgagtaaccgcgttctgctgcatccctggtgccaccgtcgcatccatgcgctcggtctggaagtcgcgaagcctgtgccggtccgcgggctg

SEQ ID NO: 289 - DNA, 1479 bp, synthetic construct
  source 1..1479: mol_type = other DNA
atgaacgtcgaacagtcgatgtgtgctgcttctggcccggcgatgcagtgggaacaaatcgactggtcgcgctgcgaacagaaggtccgtcgcctgcaggcccgtatcgtcaaagccactcaggaaggtcgtcgtggcaaagtaaaggcgctgcaatggttactgacccatagtttcagcggccgtgccctggccgtaaaacgcgtgacgcataacaaaggtaaaaatacgtcaggtgttgacaaagctatttggcggaccccggcatctcgttataaagcgatcgatacgcttcgtcgtcgtgggtaccaaccgcaaccgttgcgccgtgtgtatatcccaaaagcgaatggtaaacagcgccccttgggcattccgaccatgaaagatcgtgctatgcaggcgttatatcttttagcgctcctgccgattgcggagacaaccggcgatcttaactcctacggttttcgcccggaacgttccaccgcagatgcgattgaacagtgctataaagtggttggaatgcgccattccgcccagtgggtgctcgaaggcgatatccgtgggtgctttgataatatctcacacgaatggatgctggatcatattcctacggacaaagaagtcctgcgtaagtggttaaaaactggctatatggaaaatcgtaaactttttgcaacagaggccggtaccccacagggtggtattattagcccaacgttagcgaacctgaccctcgatgggttagaacgcctgctgaaacagactttccgtaaccgtcaggtaggagaaaagcataatcctaaggtcaacttcgtgcggtacgcggacgattttatcatcacgggaagctcgaaggaattgctggagaacgaagtgaaaccccttgtggaatcattcttgctggaacgcggactgcaactgtctcctgagaaaacctgtattacccacattgaggacggttttgactttctcggccaaaatctccggcgctatggccgtaaggtattgaccaaaccgagtaagaaaaacatgcatgcctttctggagaaagttcgcggtgcaattaaacggaactccacggctcagcaggccaatctgattggcattctgaacccgatcatccgcggctgggccaactaccatcggcacattgctgcaagcagcgcctttggcaaagcagagatggcgatctggcgcagcctgtggtcgtgggcgaaacaccgccactggaagaaaccgactgcctggattgcaaatcgctattggcaccgtctggggaacgggcgccgtatgttcgcagttatggcaggttctaacgcgcccaaaagtcgtgcgatggttgcttggctggtgaatccggcaaaaacaccgatccgccgccatatcaaagttcgtagtaacgcgaatcctttcgatccaaattggcgttcatactacgatgcccgtaaaagtctgaaacgcgcgagcagccaacag

SEQ ID NO: 290 - DNA, 1569 bp, synthetic construct
  source 1..1569: mol_type = other DNA
atgctgaaagaagaacgtcagatgacccagttaggaaattttaagattccaaaaagtggggcttcctcgactaataagctgaactggcaatctattaactgggtgaaagtaaaacgcgacgtgcgccgcctgcagatgcgcattgctaaagccattcgtgaaaaacgttataacaaagcaaaaagtcttcagtgggtgttgacgcattcgctgagcgccaaactcttagctgtaaaacgcgtaacttcgagcagcggctcacgtacagcgggcgtggatggtaaaatttgcgcaagcaacaaggacaaaatgcaactggcgttgtcgctgcgtcgttacggatacaatgcgcagccgctgcgtcgcgactatatcccgaaacgtaacggtaaacagcgccctcttggcattccaaccattaaagaccgtgcgatgcaggccctgtatctgctgggtttggaacctattgctgagacactcgctgatccgaatagctatgattttcgccagcaacggtgcaccgcggatgccattgagcagtgcttcaaagtgctgtctcacaaaacgagtgcccagtggatcctggaagtcgatattgaaaaatgtttcgatcggatcaatcacaattggctgaaagaaaacatcttaatggacgtgtcactgctgaaccaatggctggaaagccgctacatcgagcgtaaacaattacacccaacgctcgccggcaccccgcagggcggtattatttctccgaccctggctaatatgaccctggatggtttagagaaagcaattaagagtgtcgcgaaaccggcatctaaagttcacgtcatccgttatgcggatgattgggttgttaccggcaactcccaggaaattttggaaaacaaagtcatgccggccatcgagaaattcctgaaagttcgcggtcttacgtgctcccgtgagaaaaccaagatcgtccatatcaaggatggctttaactttctgggcttcaatatccgcaagtaccacgacaagctcttaattaaacccgccactaaacacgttcatgcgtttctgaagatggtgcgcaatattaccaaagcatccgtgagcctgccgacggacattctcctgcgcgttttgaacccaaaaatccgtggttggggaaactactatcggcatgttgtgagcaaggatgttttctgttatgtggataactgtatctatcttgcgattgcgcgttgggcacgccgtcggcatccgcaaaaacctgcacattggttacgcaaaaaatattttcgtcagcagggcatgcggaattggatcttctctacgaaagtatacgataaaaaggggaaaatcgtgaatcgtgaccttgtccagctcaagtatcttccgattaagcgtcatcgtaaaattattgccgaagcgacaccgtttaatcccgagtatatcgaatactttttgaaacgcaaaagttaccaggggctgaactggttgtaccgctcactgcaaaaacaggcaaaaagcttttcacgttcggcgaaactgcagaaccaaaattcccgtatcgaacaagaatca

SEQ ID NO: 291 - DNA, 1383 bp, synthetic construct
  source 1..1383: mol_type = other DNA
atgaaactgacctataaacaggctattcgcccgttcgcacgcggcccgccgctgcgtctggtccagtcccattttgcagaactgttcatccgccggcagcaaaatcttttgatgaatttttgctactccgacgaacgccgctggcgcaatattaataaaagtaccgtaccggcggaaattcagcgctggaaagacattgatttccgtaaagcggaaatcaaggtgaaaaaattgcaacgtcgtatcgcttccgcgtgggcgaacaaaaactttaaaactgtcgatacccttcagcataaacttattcactcgttctctgcgaaagcgcttgccgtaaaaacggttgttgataataaaggcagtcgcacccctggcgtcgatggtgtgatctggagcgaccttcgccagaaactggatgccatctatcagttgcgccgtcgtggttataaacccatgccattacgccgtgtttatgtcccgaaaaaggacgggacgctgcgtccacttagcattccgacgatgcgggaccgcgcgatgcagatgctgtgcaagatggcgttagagccaatcgccgaagcaacagccgacaaacgttcgtttgcgtatctgtcgggtcgtggcgcacgtgaggccattatttgtctgaaagttactatgcgtgacaacccccagtttcgctgggttatgaaggctgatgtggcaggctgctttgataatattgatcattcttggctcctggagcacattccgattgatcgtaagattctgtaccggtttctgaagtgcggctatattgaggatagtacattctacccgaccgaacgtggtgtgccacaagggggatgcattagcagcgtgttatgtaacatgacgctggatggattggaaggtttgctgaaacagcagtttgggctgagtgtatgtatgattcgttacgcggatgatatcatcatcatcggtgaaagccgcgagattctggtacaagccgtgactccggtgattgaatcattcctcgcggaacgcgggttagcgctcagcaaaaagaagaccggttattatcctgttaaagcaggcgtgtcttttctcggatggaaaacctaccgtgaccgggatcgcgtcattagcgaaccgtcaaatatcgccgtgaaccgtttaatgaacgagatcgaatctatcgcagccttggcaattgattatcacgctcaatgtgaaaaagtcagcagtaaaattcgtggctggctgaactattaccggggcatcgctcctcgcctgtccctgaacgaagtggagttctacatcgcccagtcgttactgcatatgcaggatgttgaactgctcgctggtgaaattcaatcaatcttttcagagctgctggacacgctg

SEQ ID NO: 292 - DNA, 1401 bp, synthetic construct
  source 1..1401: mol_type = other DNA
atgatccgccatcgtgataactcgagtgaatcgtggaaaacgctgccgtggaaacagctgagccgcaacctttttcgcctgcaacgccgtgtttataaagcggtacaggtgggagataaacgcaaagccaaaagtctgcagaaactgattctcaaatccaccgccgctcggctgctcgctattcgccaggtcacgcaattaaacgccggccagaaaaccgcggggatcgacggtcagacagcgctgacattcgaacagcgttttgaattgagcgagaaactgcgtaccgaggcaaataactggaaacatcaaggattgcgtgaaatccctattcctaagaaagatgggaaaactcgtatcctgaaagtgcccaccatcgcggatcgtgcgtaccagtgcctggtcaagtatgcgttggaaccagcgcatgaagcaaccttccatgctcgttcatatgggttccgtacgggtcgttccgcgcacgatgcacagcgccaactgttcaactcgctgaacagtcaagccaacggcatcgaccagcgggttattgaactggatatcgagaaatgctttgatcgtatcaatcacacagccattatggaccggttaattgctccactgagcattaaacagggcatttttcgttgtctgaaggccggcgttaatcctgaatttccggaactgggaactccgcagggcggtgtcgtgtctccactgcttgccaatattgcgttaaacggcattgaatcgattcatcgttatcatcgtgactcaaacaaacgcattaccgataaaaccagcgcagaaagcattatcgaaccgtctgtgcgttatgctgatgatatggtcattatcttgcgcccgcaggacgatgcaaccgtgattttggacaaaatctctcacttcttagccgagcgtggtatgaaagtatcagaaaaaaagaccctcgttaccgcagcgaccgatggttttgactttctgggctggaactttaaggtacaaaataatggtaagtttaagtgtgtcccgagtgtcgacaattacaaggcctttcggaaaaaagtgaaagcgatcgttaataacagcaactacggggcaacgacgaaagcagagaaactcgctccggttgtacgcggctggcgcaactatcaccgcttctgtaaaatggatggcagccgcttttcactgtggcacattgaacatcgcgcgtttaaagttttcaattctgaaactaagcagaattgccacacgtgcaaacaactgcttaaaaaagccttcccccaagtgccatacagtgagaacaagtatattaatgtgacgggtgaaaaatccccgtacgacggtgatcttacttacggcagcgagcgcaattccccgttagtgatccgccagaaatatctt

SEQ ID NO: 293 - DNA, 1821 bp, synthetic construct
  source 1..1821: mol_type = other DNA
atgagcacggcgtcttcccctctggtgtacgaatggaatgatatcccatggcgtagcatcgaacggaaagtattcaaacttcagaaacgcatctatcaggcagcacagcatggcaataaagtggcaatccgtaaactgcagaagctgctgctgtcgtcctggtatgcgaagtgtttggccgtgcgtaaagtcacgcaagaaaataaaggtaaaaaaacagctggggttgacggaaaacttgcactgtccccgaaacagcggatccgtttagtacaaacgctgtccctgaaaccaaagagtacccccgttcggcgtgtatggattccgaaacgtggcagcgatgaaaaacgtccgctgggcatcccgactatcgagaatcgggctcagcaagcactggccaaaatggccttggaaccggaatgggaagcacgctttgaacctaattcttatggctttcgtccgggtcgctcggcgcatgatgccattgaggccattcagcagtctattaagtacacgcagaaattcgtgttagacgccgacattgccaagtgttttgaccgcatcaaccatcaggcgttactggaaaagctggaaacgttcagtgtgatgcgccgcgccgttaaaacgtggttaaaagccaaaattatggatggggatgaactctttccgtcagaggaaggtactccgcaagggggtgtgatttctccattattggctaacattgcgctgcatgggctggagacagcaattaccactgcttttcctaaaacagtaaaaatcgatggcattattcacggccgctatcaaccacgtgtggttcgctatgcagatgactttgttgtcctgcacgctgatttgaaattagtggaaaaagcgaccagtattgcccaggagtggcttagcggcatgggcctcgagctgaaaccaagcaagacccgcattacccacactttcaaaaaacacgaaggaaacgtgggttttgattttctggggtttcatgttcgccagttcaaagttggtaagtgcaattatcgtacctcgggccatagccgtattctcgttgacttcaaagcgatcattaaaccgtccaaggaagcgatcgcgcgtcattaccgccaagtggccgaggtcattgaacgtaacaaaagtgctgagcaggcgaacctgattcggttgctcaacccgaaaatcgttggctggacaaactactattcaaccattgtgtcaaaggcggtcttcagcaagctggatcatcttgtcacgaaaaaacttctccgttgggcaaaacgccgtcatcaacatcagtcacgtcgccagaccgtccgcaagtactggaaattttcagaaaaagggcgtggttggatctttcaggcttcggacattagcattctgcgttggtatgcggacgtgcccattaaacgccacgtgcaggtcgcgggcaccaaaagtccgtttgatggaaactgggtatactggtctaaacgtctccagcactatccgctgttgactttccgccaggcgaaacttttaaaagagcaagagggtaagtgccgttggtgtcgtctgtactttaaacaaggagatcgtatcgaagtcgatcaccgcatcccgcgccgctatggcggtcgtgatgaatacggcaatctgcaaatgctgcacgttcattgccacgatgaaaaaaccgcgatcgatggcaccatcgacagtgttggtcctgattcgattgacgtaaacgattatgtgattgaagaaccgtgcgaagtggagagcttgacccatggtagcgaagatgaagccttcggtcgtcccgacgtcctggta

SEQ ID NO: 294 - DNA, 1659 bp, synthetic construct
  source 1..1659: mol_type = other DNA
atgcagaccatgcgcaacgcgaatgtgaccaaacgcacgacagattggcgctctatcaattggcgtaaagcgtatcggatcgttcgtaatcttcgccaacgtatctttaaagctacgcaaaaaggaaacctgcgtaaggtgcggtcgctgcagaaattgatgatgaagtgttactcaaatattttactcgcagtccgccgcgtcacgcagattaaccgtggcaaaaacactccgggcgttgataaactgattattaaaacaccagaggctcggggtattttggtagataccttatccttattcattccgtggaaaccattaccgacaaaacgtgtgtatattccgaaaagtaacggcaaaaaacgtcctcttggcattagcactattattgatcgctgtatccaagccattgtaaaaaacgcgctggaaccctactgggagagcaagtttgaaattagcagttacgggtttcgtcccggacgttcagcccacgatgcgatcgaaaaaatctatcttaccgcctgtccgcatcgccgtaaaaaatgggtactggacgcggacatcaaaggctgctttgacaacatctctcatgaattcttaatgaaaacgattggaaattttccagcccgtaaactggtgtaccagtggctgaaagctggttatgttgaacaaggtgaatattttcatactagctcgggcaccccgcaggggaatattatttcaccgttgctggccaacattgcgttgcatggcatggaagaagctctgggtattaagtataataaccgcagcgaaattgttggcaatcgtgcattggtgcgttatgcagatgattttgtgattttttgcgaaactaaagaagatgccgaacaagcccagaccgcgctcgagaaatggctgaacttgcgtggcctggagctgagcaaggaaaaaacccgcatcgtccatctgaaagaaggtttcgacttcctgggtttcaatatccgccagtaccaggtcaccaatacgaaaaccgagtggaaactgttaatcaaaccttccaaagagtctatcctcaacatccgtaaaaaactccggcaagaatggcttaacctgaaaggtcataacgtgaactcagttattgagaagctcaacccaatcattcgcggcgaggctaactattttcgcattggcgtggcgtcggaagcattttccgcactggatgattggatgtttaaacgcgaatgcaagtatgtaaaccgtactcacccgaaaaaaaataagcagtggcgtgcgaataagtattgggggaaacttaatctggaacgcaatgataagtgggttttcggggacaagaacaccgggaaacatatcctgaagttctcttggttcaaaatcaagcgtcacaaacttgttgtcggtaaaagttcccccgatgatccggcgctgcgcaagtactgggaagaacgtgaaaaagacaaaacgtcgaatcatcctaagagtatccagaaaattgcaagcaaacagggtcatacctgtccgatttgcggtcagtccctgtacaatggcgaggagatccacaaacaccacaaaacgccgaaaagcaaaggcggaaccgacaactacagtaacctggaactggtgcatctgtattgccaccagcaaattcactcgggtaca

SEQ ID NO: 295 - DNA, 1671 bp, synthetic construct
  source 1..1671: mol_type = other DNA
atgaccaaactgaatcagaaatggcacaacattaactggaacaaaacctcgaagtacatcaagaatcttcaggaagaactggtggtagcgtacaagaacaacgatcaaaaactcttattctcattacaggaaaaactgatgatgtcatttgaaggtcgtgctttagctgtacgccagattgttaccaacgatggcaaaaaaacgccagggttcgataagattatctggaattctcctagtgcgaaactgcaggcgattttacaactgcgtgaaatcctcattcagaagtctggtgattaccaaaccggcccggtccgtcgtacttggattccaaaagatcagagcgacgaactgcgtccgctcggtatcccgaatatgattgatcgtggtctgcaggcattggtgctgatgtgcctggatccgattatcgaagaaatgagcgacacctatagttttggctttcgcaaatatcgcaatactggcaatgcgatccagcgcattcgtacaattctggataaaccgaaaggtccgaagtgggtttgggatgccgatattgaaaaatgctttgacaaaatttcccacgaattcttggaaaaagagacgaaacttattgcatgcccaaaggcttacgaatatattatcaagtggttaaaagcgccgatcatcaataaaggcattaagaccttccccagcgatgggacgccgcagggcggcatcctctctcctctgctgtgtaacattgccttaaacggattggagaacgccgtgcgtgatggcctgccctctccgaatagtagtgaaggccgtaaaatttccggttcgtgggttattcgttatgccgacgacttcatcgtaaccagcccgtgtaaagaacggctggtcaaagaacacattcctcgcgtatcgttttttctttcgaaacgtggtttgaacatctcggaaaaaaagtccaaaatccgttctttggaaaacgaaggcttcacatttctgggatgggatgttacactgaaaagccgcagcctcaagcgcaataagagtaaaaccaacaaaaaagtgctgattatccgtcccagcaaaaaaagcatcaaaagtttcaaacgcgagattaaagataagtttcgcagcaataaaccgattcgggcactgatctcagagcttaacccggtgctgcgcggctggacgaactactatcgcgattcgtatcactctcaggaagtttttcaatcaattggacattatattcaccaattgtggtggaaatgggcgcagaaaaaacatccgaagcgcaataaaaattggatctacaatcgttatatcttcaatacggagaagaactcctggcgtatcggggagtccaaagacattatgctgtttgacgtgattcaggcgaaacagcttcggattaaaagcttacgtaataacgtcaacccatatctggatgaggactactacattcagcgcactgtcattcgtgacagcgaaaaatttcgcgttgcaatctacaaaaaacaagattttcggtgctatgtgtgtgagcaatccctgtatgggagtgaggaagtgcatcttcatcatctgattcctcgtaaagatggtggtcaatatactctggaaaacatcgtcccagtgcatgccacctgtcatgagtcaatcacgtatacccgcaaagac

SEQ ID NO: 296 - DNA, 1497 bp, synthetic construct
  source 1..1497: mol_type = other DNA
atgtcagtgtccgaacccgaaatcacatcggtcactgaccttaccgataaagaactcacgttacaatggaaaaccatcgactggagtaaagccgaaggtattgtcaataaccttcagagccgtattgcatcagcggcaaaagaaggaaattggaaaaaggtttcgaaactgtctcgtctgctgactcacagttattatgcgcgggctcttgcggtacggaaagtaagcaccaacaaaggtagtcgtacacctggcatcgatggcgtgttatggacctcttctggtgataaaatgcgcgcggttttacaactgaaaagcaaagggtaccacgccaaaccgctgaaacgtaagtacattctgaaaaagaatggtaaactgcgtcccttgtccattccgacgatctacgatcgcgctatgcagactctgcatgctctcgctttaggtccagtggaatcagcgacaagcgataaaacgtcctttggctttaagccttatcgtagcaccaaagatgcatttgcatatcttaatatctgtctgtctaaaaaaaacgcgccgcagtggattgtcgaaggggatatcaaagcctgctatgacgaaatctcccacgagtggatcctggccaacacattgatgaacaagaaagtcctgaaagaatttctgaaatccggatacatcgaaaattatcacctgtttccaaccgagaatggcacgccgcaagggggcactatctcgccgatcatcgcaaacatcgttttgaacggcctggatacgattctcgcggaagtgttctattcttggaacaacggaacgattgacaagaaacatcggaacaaacatcgcgtgaactttgttcgctttgcggatgatttcgtaattaccgctgatagtccggaaaccgcccacaaaattctggacattgtgaaaacgttccttgagccacgcggtctgaccttaagcaaagagaaaaccttggtgacccacatcagcgatggctttaccttcctcggttggaatttccgcaaatacaagggtaaactgctgactaagccgtcgaaagaaagtcagaaagatattatcacgaaaattcatgacgtcatgtataaagcccgtgcccgttctcagagcgagctgattcgcctgttgaaccctattattcgcggctgggcgcaataccataatcatgcgatttcaagcgcaatcttcaaaaagttagatcacattatgttcatcatgctcgttagctgggcgcgtcgtcgccacccgaataaagggtttgcatggattatggccaagtattggcatcgtatcggcaagtggaaacatgccttctcgacagactcacagaccctggagcgcttttcgaatatgaaaattatccgtcatcgtttggctaaactggacaaaaatccgtatattgaccgcgattactttgaacgttggcgggtgatcgagcattatcgcaagaaacagattagctacagtaagagttccctgaac

SEQ ID NO: 297 - DNA, 1695 bp, synthetic construct
  source 1..1695: mol_type = other DNA
atgaatgatatcaaaacgagctgcgccagtacagatcgtaaaattgttgcgtgggattcaattgattgggacaagtgcgaatatgaagtgcagaaactgcaagcacgtatcgtcaaagcccaaaaagatggtcgctactgcaaagtaaaggccttacaatggacgctgacccattcattttcagcgaaagctcttgcagtgaaacgcgtgacctctaacaaaggtaaagaaacaagcggtgtagatcgtgttctgtgggattcgccgctgggaaagtggaaagcgattagtaccctgaaacgtcgcggctactgcccattaccgctgaaacgtgtgtatattaaaaaaagcaacggtaaacttcgtccgctgggcatcccgaccatgaaagaccgggcgatgcaagcgttatatctgatggccttggatcccgtggcagagacaacggctgataatcatagctatggctttcgtaaagaacgcagcacagcggatgccattgtacagtgtttcattgtgctgtcacgtacggtcgcaccggaatggatcttggaagcggatatcaaagggtgctttgaccatatttcccatgagtggctgctcaacaatattccgatggaccgggttatgctcaagaaatggttgaagtgcggctttatctttaacaaaatcttaaacccaacggaagaaggaaccccgcaaggcggaattatctcgcctactctggctaatatgaccctggacggtattcagaagcttctgcaggaacgcttcaaaaaacgcaaagttaaaggcgtcgaaatctacccaaaaattcaccttgtccgttatgcggatgatttcattattactgggcgtactaaagaagttctggaaaatgagatcaagcctttaatttgcgagtttctggccgagcgggggttgaccctgtccgaagaaaaaactaaaattacacacattcgcgagggcttcgacttcctgggtttcaacatccgcaagtttaataataccctgctcaccacccccagtgagaaatcgatcgaaaaattcttggagaagattcgcaccattatcgaaacgaagaaatccactaagcaggagagcctcatccgtgtacttaacccgatcattaaaggttggtccaattattatcgcaccggcactgctgcaaaaagttttcagcgcgtcgattgggaaattttccgcaaactttggcagtgggcgcgccgtcgccatagccagaaatgtaaaggctgggtgaaagaaaaatactatcgccgtatcggtaaccaggcgtggtgtttttctgctgaaaaagagatccagaaaaagggcgaactgaaatatgtgcagttggtccacctggcagccgttaaaaccaagaaacacgtgaaaatccgccatgacgcaaacccgtatgacacgaattataagtgttactttgaagaacgtgccacgcgtaaaaaactggaagccttaaaagggaaaagttcctcttggaagtatgcgtgggagctgcagaaacggaagtgtcctatctgcggcgagacgctgaacctgaacaatgactggaaaatttcgaagcaatttgtggatggtaaactcaaagaacgtatctaccatgaagactgttactataacgatgttcacccaaccaaaaaaaagtactacgaaagcgtgtctttacagaaactg

SEQ ID NO: 298 - DNA, 1296 bp, synthetic construct
  source 1..1296: mol_type = other DNA
atggctagcgcatggagtcatcctcaattcgaaaaatccggaatgtcgaacaacgtgagcccttacaaggccgtccgcaccatggaaagattatccgaagcatggaaacaagtatacaagaatggtatcaagtccacgtctattgataccaagaatgagatccttgagtttaagaagaatgagattaagaacttgcggaaaatccaacgtctcctgcaacagaataagttcaagtttgaaaacagtcgcggaattctgcttaagcggaaggggaaggatccacgtccaatagtaatagcaagtgtacagtctcgcatagtgcaacgttctatactcgatgtacttcaagagaactcaagcattaagaagtactacctttctgtgcctacgagctacggcgcaataaaaggtgaggacaaaggggtgcgtaacgcaatcatagcgactatcgaagcaatcaagaacggcgcggaatacttctacaagagtgacatcgcctcgttcttcacgaagattgcaattccgaaggttatcgaagttatatcaacttttataccggacaaggatttcgtggagttgttgcgcaacgcgacgatcttagaaatatctaatcttaacgatttgggcgatctgaagcactactttattttcgatgatatcggtactccgcaaggctgctgtttgtctccactcctgggtaacatatttctggccgagtttgataaggaactgaacaagaatgacatcatttgtttgcggtatctggacgacttcattctgttagcaccaacagagaaggcagtacgagcggcattccggcgcgcttccaagattctggccaagttgtctcttgaagcgtatacagccgtatcagatccaaagaaagcgaaagtaggctactacaaacaaggctttgagttcttaggcgtagagatcttaaataaattaatccgaccaaacaaggcttcatgcaataagttgctgaacgagatcaaggagattataaagaacagcctggagatgaacttctcaatgactcaatccttatacaaagaggagtactctgttactaagacgctctatcatattcacaataagattaagggttggggcaaccaatactacttttgcaacgaccgaaacatcttcatcactcttgacgagaaaatttcaggggagatcgatcgttacctgaatagtttccttttgaaacgggagaagctcgacgccaagcagaaacggaaacaattaggtatccaccttttaatcgactctaagaatgtaccaataacctga

SEQ ID NO: 299 - DNA, 1362 bp, synthetic construct
  source 1..1362: mol_type = other DNA
atggctagcgcatggagtcatcctcaattcgaaaaatccggaatgaaccaacagggtcaccgtcacttgtctagtctgtcacttgaagtacggaagcggcgtacgttggaagatgcttgggcggctatccgtgcgaacgcccgggtgagtaaatctgccgacacccgtaaagaaatagaagcgtttgaggcctcattatccagtaaccttcggcgtataagctcggaacttcagaagggtaagttcgccttcgccccggcgaagggcgtcaagattcctaaaggggcggataagcgtcagttccgtcctttggtggtagcgcgtgtagaaagtcgagtggtgcaacgcgcgattcatgacgtactttcagaggttcctgcgttacagccattaatctataccccacactcctttggtggcgtaaagaagaagcgaaagggagaactggcggcggtgcctgctgctatccaggccgttctggacgccataaaggctggcggcacctatttggtccgaagtgacattagcaagttcttcacacggatccccaaatcaagtgttacgaatcttgtcgctaacgccgtcgacgatgtagactttatctcactgttcgagtctgctattaaagtcgagctggagaacatggcgcaattgcgtgagtctgcatcggcctttcctattgaggacataggcttagctcaagggaattgtctgtcccccttacttggcaatttatttcttcacagcttcgacgaagagatgaatcgccaggcaggggtccgctgccttcggtatattgacgacttcattgtaatcgggacttcttccgagtgcgccgagaaggcgttttccctggctacgcaacgtctgaagacgttggggatggagatttcagcgggtaagacaaaagagggcagagtaagagatggtttcgagttcttaggcatccaccttagtccaggcctcatccgtccgagtaagagctctcgtgaccgcttaatacaaagcgtgaaaagtgcatttgacgagtctaataagggcatgcttggcgcgaagaagggtagcgctatccttaagagccaatctctgttagaaacgttgtgtcgagtcggtggtatcatccaaggttggggtaagcactatcgtttctgcaacgaccaggagacgctccgtcagttagatgtcaagattgaggcattgctgaagcgatacttaggaatatatcgagaggcacgggatactgtcggtggcgctactaaatggaacttactgggcatcgagagcttggcccaaatcaaacgtacccccttttcttggccagaggtggagcaaaagcaaagcgcgagtagcgctgctaagtga

SEQ ID NO: 300 - DNA, 1356 bp, synthetic construct
  source 1..1356: mol_type = other DNA
atggctagcgcatggagtcatcctcaattcgaaaaatccggaatgaagacgctgctgcaggacgtccgatctgaacaaaacattttcgctgcgtggcgacacgttaagtcttccgcaattaatagtcgtaatgatgatatccgcggggctgcgagtgcctttgaacacaatcaccagaagttcttacggcgtattatcctgcaactgcgtgctggaacgttcgaatttcccgcggccactggggttttgaaagacaagaagttgcgtgccagtcaaaacaaggcgccgcgtcctattgttgtcacagatttggagactcggatagtccagcgagctttgttacaggttctgcagcctcgtgaaacgctggatcctcgatcgcgcaatagctcccttcgcattaagaaggacgagagactgggctcgctcaacgacgttaacgtatcaaaatacggcgtcggcggtctgattgcacctcatggcggcgttgagagtgctattcgtttgattacgcacgcgatagattcgggcgcaaattactacttcagaagtgatatcgaggctttcttcactaagattcccaagtctaacgtggtcgagcgcattgccatagaaacccgtgatatggacttcgccaaccttttcgcccgcgccctcgaagtcaagcttaataacattgagcaaatcggacctttcgagtatcttttccctactggcaaggaaggcgtagcccaaggatcaccactctccgcgtttgcgggaaacgtgctcctctaccaactggaccaagagctcaacgcccttgatgttacggcggtgcgctatatagacgatattctgattgtggctcaggatgttgaccgacttaatcaagcgattgactacgccgagcaatctttgagtaagcacggtatgaaactgtacgaacccaaggccggatcttcaaaggcagcgaagggccgttgcgacaatggcattgacttcttgggttgtttcctgcaaccaaacaaatgtatcccatctgccgactcgatagctcgtttcaagagtagagtgacgtccgagttgagtgactccaagagtcgtattaaagatgctttaaaagtgggaaagttactggacaagcgattcagcaccacagccacgctggaccgtgtcttcaactacgtctatgggtggcaaaaggctttctctttctgtagcgacgtggtgccgttcgaacaactggaccgtttcgttcgccgccagattttagactacgagatcgctgtacgaagaatcgtgaaggacagcagcgatgagagccagacgatggtcatggggctgccttctatgcgtcagttgcacaagggatga

SEQ ID NO: 301 - DNA, 1284 bp, synthetic construct
  source 1..1284: mol_type = other DNA
atggctagcgcatggagtcatcctcaattcgaaaaatccggaatgtctcgactttataaggacatctgctcgcaacgcaccctgtatggtgcttggcgtaaagtacgtagcagtgcattcttctcgagcagtgatgagattaagcgcgaggccgaggagtttgaatcacgtttgccggactcgttaatcgaaattcagcgtgcgcttagcaagcaagccttcatatttctccaacaaacaggtgttgcacaaaagaagccgggtggcaaaagtcggccccttgtgttggctccgatccctaatcgggtcgttcaacgggcccttctggacgtgttacagcgtaaggtccgcttcatcaagcgcgttctcataactcctacatcctatggcggaattcccgagaaacgcgttgcgatggctatcgccgatgcgcgtaaggctatgttggcaggtgcgcgattccacatccgttcagacatcccggcgttcttcacgaagatcaataaagaccgtgtactggagatactgcgtcctcacctgaattgtgcggcgacattaaaactgttcgaagaggctattaagacagatttagctaacattgacgacttgcgccgtcgtcgactggacgacatattcccgcttgggattgaaggggttgcccaaggatcgcccctgagccccctgctcgcaaacatatacctcgcagacttcgaccaaaccatgaactcgaacgggataacctgtctccgttacattgacgatttcttattactgggcgccagcttgtccgacgtagacaaagcttttaatagatcgcttaaggaactcggcaagattggactcggcgcttacgacccacgcacgaacaaggccaaggcatcgagaggtacgactgacacgggcttcgactttcttggttgcaatgtctcccctgggcttgttcaacctagtgaagctacgcgcaagcgtttcaagatgaaattagatgccgaattcgcgacagctagtcgtgcattaagatacaatgcgcagaaccgcgacggagatggcaagtattcgtacagttcggcgttatatcggattgacaaaatcatccttggatggggtaaggcattcactttctgcaatgcgtcacaaacgatgaaggccctggacgatttcgtatcccagaaactcatgaccctggaagctgagaagaacgcagtgttggccagatcaaactctgaggctcggcgaagagtccttggcgtacgacttcttacgtatgttgcgtccccagcttga

SEQ ID NO: 302 - DNA, 1305 bp, synthetic construct
  source 1..1305: mol_type = other DNA
atggctagcgcatggagtcatcctcaattcgaaaaatccggaatgtcattcacactttatgaggaagttagtgatcaggatactctggctgctgcttggcggcacgttcgtagatccggtatgctttcgcaatccgaaaagacgaaggaaagcataaaagcatttgactccgacattgatacccaactggcgaagatcgcctcgctcctcagagaacacagtttcgattttgggactgccaaaggtgctcctataaaacgcccgggcaaggagccgcgtccccttctggttcctgaagttccagcacgaatagtgcaacgttctctgttagatacacttcaaaaccagccggggatacaagcttatgtggatcacccttgctcatacggcggcttaccgaagaagaaccgcgcggacgcaatccgccacgcttgtgaggctattgctgatggcgccacctattttatacgtagcgacattcacggcttctttaccggcattctgcgccaaggagttttagacacgatacaagaaaccctgagagacgacagtatcgcatccctgcttaacgaagcgacatctatcgaaatcggtaacgctgaagagattcaaccttacttgcatttattcccagactacaacgaaggaatcgcgcaggggtgttgtctgagtccccttttcggaaacatttatatgcatcaattcgacgaggagatgaaccgaggggacgtcgtgacattacgttacattgacgatttcgttatcctgggtcaagacagagagtcaaccgagcaagccttccgtcaagctcggagaatgttacaagcactgaatctttcagtttaccgccccggggacggaagcagaaaggccgcggaaggctcaattaagagaggcttcgaatttctgggttgtacaatcacaccccactgcgtggagccgtcaagagcagcgcggtccgcgtttcttgaacgagtgcggaatcaattagacttagctgcgcacgagatgcgtgcaggactgcacgagctcccagagcactaccggtctagcttagtgcagaccctttcgcgtatctctcggatgatcagagggtggactgaacagtaccgattctgcaacccttcagacgcctttacaagtattgacgtcaaggtagatagaatggtaggggcgtatttaagatctttctttaagcattacaagaagtgcaagagatctcccgccgtacgtcgtcgccttctgggaatttggttggctacggactccagccgtactccgatcctgccgatccgctccaagtga

SEQ ID NO: 303 - DNA, 1251 bp, synthetic construct
  source 1..1251: mol_type = other DNA
atgtcgaacaacgtgagcccttacaaggccgtccgcaccatggaaagattatccgaagcatggaaacaagtatacaagaatggtatcaagtccacgtctattgataccaagaatgagatccttgagtttaagaagaatgagattaagaacttgcggaaaatccaacgtctcctgcaacagaataagttcaagtttgaaaacagtcgcggaattctgcttaagcggaaggggaaggatccacgtccaatagtaatagcaagtgtacagtctcgcatagtgcaacgttctatactcgatgtacttcaagagaactcaagcattaagaagtactacctttctgtgcctacgagctacggcgcaataaaaggtgaggacaaaggggtgcgtaacgcaatcatagcgactatcgaagcaatcaagaacggcgcggaatacttctacaagagtgacatcgcctcgttcttcacgaagattgcaattccgaaggttatcgaagttatatcaacttttataccggacaaggatttcgtggagttgttgcgcaacgcgacgatcttagaaatatctaatcttaacgatttgggcgatctgaagcactactttattttcgatgatatcggtactccgcaaggctgctgtttgtctccactcctgggtaacatatttctggccgagtttgataaggaactgaacaagaatgacatcatttgtttgcggtatctggacgacttcattctgttagcaccaacagagaaggcagtacgagcggcattccggcgcgcttccaagattctggccaagttgtctcttgaagcgtatacagccgtatcagatccaaagaaagcgaaagtaggctactacaaacaaggctttgagttcttaggcgtagagatcttaaataaattaatccgaccaaacaaggcttcatgcaataagttgctgaacgagatcaaggagattataaagaacagcctggagatgaacttctcaatgactcaatccttatacaaagaggagtactctgttactaagacgctctatcatattcacaataagattaagggttggggcaaccaatactacttttgcaacgaccgaaacatcttcatcactcttgacgagaaaatttcaggggagatcgatcgttacctgaatagtttccttttgaaacgggagaagctcgacgccaagcagaaacggaaacaattaggtatccaccttttaatcgactctaagaatgtaccaataacc

SEQ ID NO: 304 - DNA, 1317 bp, synthetic construct
  source 1..1317: mol_type = other DNA
atgaaccaacagggtcaccgtcacttgtctagtctgtcacttgaagtacggaagcggcgtacgttggaagatgcttgggcggctatccgtgcgaacgcccgggtgagtaaatctgccgacacccgtaaagaaatagaagcgtttgaggcctcattatccagtaaccttcggcgtataagctcggaacttcagaagggtaagttcgccttcgccccggcgaagggcgtcaagattcctaaaggggcggataagcgtcagttccgtcctttggtggtagcgcgtgtagaaagtcgagtggtgcaacgcgcgattcatgacgtactttcagaggttcctgcgttacagccattaatctataccccacactcctttggtggcgtaaagaagaagcgaaagggagaactggcggcggtgcctgctgctatccaggccgttctggacgccataaaggctggcggcacctatttggtccgaagtgacattagcaagttcttcacacggatccccaaatcaagtgttacgaatcttgtcgctaacgccgtcgacgatgtagactttatctcactgttcgagtctgctattaaagtcgagctggagaacatggcgcaattgcgtgagtctgcatcggcctttcctattgaggacataggcttagctcaagggaattgtctgtcccccttacttggcaatttatttcttcacagcttcgacgaagagatgaatcgccaggcaggggtccgctgccttcggtatattgacgacttcattgtaatcgggacttcttccgagtgcgccgagaaggcgttttccctggctacgcaacgtctgaagacgttggggatggagatttcagcgggtaagacaaaagagggcagagtaagagatggtttcgagttcttaggcatccaccttagtccaggcctcatccgtccgagtaagagctctcgtgaccgcttaatacaaagcgtgaaaagtgcatttgacgagtctaataagggcatgcttggcgcgaagaagggtagcgctatccttaagagccaatctctgttagaaacgttgtgtcgagtcggtggtatcatccaaggttggggtaagcactatcgtttctgcaacgaccaggagacgctccgtcagttagatgtcaagattgaggcattgctgaagcgatacttaggaatatatcgagaggcacgggatactgtcggtggcgctactaaatggaacttactgggcatcgagagcttggcccaaatcaaacgtacccccttttcttggccagaggtggagcaaaagcaaagcgcgagtagcgctgctaag

SEQ ID NO: 305 - DNA, 1311 bp, synthetic construct
  source 1..1311: mol_type = other DNA
atgaagacgctgctgcaggacgtccgatctgaacaaaacattttcgctgcgtggcgacacgttaagtcttccgcaattaatagtcgtaatgatgatatccgcggggctgcgagtgcctttgaacacaatcaccagaagttcttacggcgtattatcctgcaactgcgtgctggaacgttcgaatttcccgcggccactggggttttgaaagacaagaagttgcgtgccagtcaaaacaaggcgccgcgtcctattgttgtcacagatttggagactcggatagtccagcgagctttgttacaggttctgcagcctcgtgaaacgctggatcctcgatcgcgcaatagctcccttcgcattaagaaggacgagagactgggctcgctcaacgacgttaacgtatcaaaatacggcgtcggcggtctgattgcacctcatggcggcgttgagagtgctattcgtttgattacgcacgcgatagattcgggcgcaaattactacttcagaagtgatatcgaggctttcttcactaagattcccaagtctaacgtggtcgagcgcattgccatagaaacccgtgatatggacttcgccaaccttttcgcccgcgccctcgaagtcaagcttaataacattgagcaaatcggacctttcgagtatcttttccctactggcaaggaaggcgtagcccaaggatcaccactctccgcgtttgcgggaaacgtgctcctctaccaactggaccaagagctcaacgcccttgatgttacggcggtgcgctatatagacgatattctgattgtggctcaggatgttgaccgacttaatcaagcgattgactacgccgagcaatctttgagtaagcacggtatgaaactgtacgaacccaaggccggatcttcaaaggcagcgaagggccgttgcgacaatggcattgacttcttgggttgtttcctgcaaccaaacaaatgtatcccatctgccgactcgatagctcgtttcaagagtagagtgacgtccgagttgagtgactccaagagtcgtattaaagatgctttaaaagtgggaaagttactggacaagcgattcagcaccacagccacgctggaccgtgtcttcaactacgtctatgggtggcaaaaggctttctctttctgtagcgacgtggtgccgttcgaacaactggaccgtttcgttcgccgccagattttagactacgagatcgctgtacgaagaatcgtgaaggacagcagcgatgagagccagacgatggtcatggggctgccttctatgcgtcagttgcacaaggga

SEQ ID NO: 306 - DNA, 1239 bp, synthetic construct
  source 1..1239: mol_type = other DNA
atgtctcgactttataaggacatctgctcgcaacgcaccctgtatggtgcttggcgtaaagtacgtagcagtgcattcttctcgagcagtgatgagattaagcgcgaggccgaggagtttgaatcacgtttgccggactcgttaatcgaaattcagcgtgcgcttagcaagcaagccttcatatttctccaacaaacaggtgttgcacaaaagaagccgggtggcaaaagtcggccccttgtgttggctccgatccctaatcgggtcgttcaacgggcccttctggacgtgttacagcgtaaggtccgcttcatcaagcgcgttctcataactcctacatcctatggcggaattcccgagaaacgcgttgcgatggctatcgccgatgcgcgtaaggctatgttggcaggtgcgcgattccacatccgttcagacatcccggcgttcttcacgaagatcaataaagaccgtgtactggagatactgcgtcctcacctgaattgtgcggcgacattaaaactgttcgaagaggctattaagacagatttagctaacattgacgacttgcgccgtcgtcgactggacgacatattcccgcttgggattgaaggggttgcccaaggatcgcccctgagccccctgctcgcaaacatatacctcgcagacttcgaccaaaccatgaactcgaacgggataacctgtctccgttacattgacgatttcttattactgggcgccagcttgtccgacgtagacaaagcttttaatagatcgcttaaggaactcggcaagattggactcggcgcttacgacccacgcacgaacaaggccaaggcatcgagaggtacgactgacacgggcttcgactttcttggttgcaatgtctcccctgggcttgttcaacctagtgaagctacgcgcaagcgtttcaagatgaaattagatgccgaattcgcgacagctagtcgtgcattaagatacaatgcgcagaaccgcgacggagatggcaagtattcgtacagttcggcgttatatcggattgacaaaatcatccttggatggggtaaggcattcactttctgcaatgcgtcacaaacgatgaaggccctggacgatttcgtatcccagaaactcatgaccctggaagctgagaagaacgcagtgttggccagatcaaactctgaggctcggcgaagagtccttggcgtacgacttcttacgtatgttgcgtccccagct

SEQ ID NO: 307 - DNA, 1260 bp, synthetic construct
  source 1..1260: mol_type = other DNA
atgtcattcacactttatgaggaagttagtgatcaggatactctggctgctgcttggcggcacgttcgtagatccggtatgctttcgcaatccgaaaagacgaaggaaagcataaaagcatttgactccgacattgatacccaactggcgaagatcgcctcgctcctcagagaacacagtttcgattttgggactgccaaaggtgctcctataaaacgcccgggcaaggagccgcgtccccttctggttcctgaagttccagcacgaatagtgcaacgttctctgttagatacacttcaaaaccagccggggatacaagcttatgtggatcacccttgctcatacggcggcttaccgaagaagaaccgcgcggacgcaatccgccacgcttgtgaggctattgctgatggcgccacctattttatacgtagcgacattcacggcttctttaccggcattctgcgccaaggagttttagacacgatacaagaaaccctgagagacgacagtatcgcatccctgcttaacgaagcgacatctatcgaaatcggtaacgctgaagagattcaaccttacttgcatttattcccagactacaacgaaggaatcgcgcaggggtgttgtctgagtccccttttcggaaacatttatatgcatcaattcgacgaggagatgaaccgaggggacgtcgtgacattacgttacattgacgatttcgttatcctgggtcaagacagagagtcaaccgagcaagccttccgtcaagctcggagaatgttacaagcactgaatctttcagtttaccgccccggggacggaagcagaaaggccgcggaaggctcaattaagagaggcttcgaatttctgggttgtacaatcacaccccactgcgtggagccgtcaagagcagcgcggtccgcgtttcttgaacgagtgcggaatcaattagacttagctgcgcacgagatgcgtgcaggactgcacgagctcccagagcactaccggtctagcttagtgcagaccctttcgcgtatctctcggatgatcagagggtggactgaacagtaccgattctgcaacccttcagacgcctttacaagtattgacgtcaaggtagatagaatggtaggggcgtatttaagatctttctttaagcattacaagaagtgcaagagatctcccgccgtacgtcgtcgccttctgggaatttggttggctacggactccagccgtactccgatcctgccgatccgctccaag

SEQ ID NO: 308 - DNA, 1458 bp, synthetic construct
  source 1..1458: mol_type = other DNA
atggctagcgcatggagtcatcctcaattcgaaaaatccggaatgaagccgattataatcgaagacggtcggacgatagtgttagcccgtgggtacttctcgccccacagatacgggacgggtcgattcggcggcttcaatcagattcaggacgggctccttgcagaccctgagctgctgcgtcaagttgtatccaccatcatgtgcccagaagagagaacgttgattcctgagaatgacttctatcctgaatgctgggagccagagaagtatgaagcggatggtccgcttggctccatagacgctttcttcactacgttccgccgcatcgccagacacgatatgtactgttccactgttgagcaaggcgaatgggtcatggcttacggtacggaacaacttacctaccggcgaatgaaccggccactcgacgacaagcatttccgtttaaagtcaatccgattaccggacgagagcgaccgggcgttggtcaagaagtgctttgaatttcgcgtggcacccgccatcacgcattgcttaatcgtgggtcgggcattcatgcgtgaggacaaaccgatgtataagcacttcaagaaacgcactaccagcaaagtgcgtgatatttgggcaccggagcccgaggtaaaggcagccttacgtcatttattgcacccgctgaattcggcgtacgacatgaagcggtctggttcaccgcaatacgcttacacaaaagaccgcaatatcttaatgaacgcggagccgcacgcacgcaacaagtggatgcttaacgcggatattacgggcttctttgatcactgcgactgggacctggttaagggttacatgagattcctcatgaaagacatctccgctgaagacaaagctgttcttaaagttatgttaattaacccagccacgggtggcctgtaccaaggtagtcccgtatcgggagctctgtcaaacgcgatcctcagacccgcggccaagtacatgaaagctttctttcaaaaggaaggacgtaccctgaccgtatatgccgatgacataactgtgtctcagggagcagccatcgattcaacagttcgtaagaacatcgtcggtaaaattcgtcatgccttcgagaagttcgacctgccgtttgaccttaagccgtctaaaacacgtgttagcagaaacaacggtcggaaagtcaccggtattagaatcaaccatcttgatcaatgcacgatcccactgccgaagtatagattgttgcgttcgatgctgcaccgtatgagttcgggtggtgacgtgaccatggcaaaatcccaacttaaggggtatcttgagttcgcgcgattcaatgatcgttccggtaagattgaccgtttgatcgacaagtaccgcgacgtcttggtggacaagggcatgataagaccaattctggacccgcagccagtagagatccctgaggagtga

SEQ ID NO: 309 - DNA, 1668 bp, synthetic construct
  source 1..1668: mol_type = other DNA
atggctagcgcatggagtcatcctcaattcgaaaaatccggaatggatgacaagaacaagttgtacctgattaatgatggaaagacgatcgtaacccgtttcggtgcaatcactccattccatcaaagcaagaagtacgaggatacgttgaagatcccggaaaagtttctggaagacccggaaagtctccggcaattgatcggattcaagctcttcgaagaccgcacgaagatcataaataagaacgatttctacatgcgggacccacaagtatataagaaggggaaacaaaccacattaattagcttcttacaggcagcacataaggtgatgcgccttcactacgagaattatagagtcgaaattttcagtaagtacgtagttgtgttaaattgtcccactattaagtttaccggtacacaagtaaaagagacgtgccatatcgactcaaagacagcgaacggcgagcgaaagcctctgctgatcagtgcctgctataaggtcgaggacgatgacgaacgcacgaagatcttcgacctgctgacgcttaagtacgcccccgcgatcatagacgtgtatattactacactgcgtttggaagcggccgggacgaagctgtaccagtactataaggttccaactagcactaaggtccgggagatatgggcaccagaagatagtctgaaagattctatgcgacatctcttgttgccgctcacgtcggcgtacgacatgaagaagaagaacagtacgcaatacgcttatatcaaggagcggtcgatcgtgaacaacgccgaggtgcataaggacaacaaatatatcgcgaaattcgacattaaaggtttcttcgacttttgtaactgggatctttcttggaaatacctcaagttcctcttcccgaaggataaatacggcaagaaggccgagctgtacgacgacgtaaagaacacgttaaaacgcgtgattattaatgaacaaactggtggactgttccaagggaaccctgtctcgggtgttatttctaatgctatacttcgtccattctctaactacatactgaacatcctggaaaagcaagcagatgtcaagaatggggtgttcccgtctatcaatgagaagaatgcggagactgagagtatcgacccagagggtaacattacaaccaagttcgacgggaaggaatacaagtccttcagcaaatatacggatccgagcaacgaagacttacgttacgccgtatcagtttatgcggatgatataacggtgtcgtctaattaccctatagactggaacgaggcaaagcgcatcagcggtatattgcgatactcgttcgagcacctggagttgcctttcaagctgaacctgaagaagacttctattgcccgtaataatggtcgtaagatcactggcgtacggatcaaccataacgatgttatggttgtatcgcgggtgaagtacatgcttctcaagtcaatgtgtcaccggatcaaacacggtaagaaaatctcaatgccgaagaatgtcttccaaggcaacttagcatacgcccgtttcgtggatcacagtggaaagattgagactctcatagctaaataccacgctaacttggttgaatttggaatcaacttgaagttacccggagagcttgcggactcgtatgtcgagtga

SEQ ID NO: 310 - DNA, 1017 bp, synthetic construct
  source 1..1017: mol_type = other DNA
atggctagcgcatggagtcatcctcaattcgaaaaatccggaatgttactggaaaagctgcaaatacaatctaaccagtctctcgaacgcttagagcgattcgcaacgtcagcgtccaagcggtacaaggttttccaaatcccgaagcgttccggtggcttccgtataatagaacagccgtcaaaggagatcaaggcgatccagagatggttgatagaggcgttattcgacgaatttcccatccaccattcagcaaccgcatatatacggggcaagaatatacgatcgaacgccgaggtccacgcggagagtaacttcacattgaagctggactttgagaacttctttccttctttcacggagcgccacttaatcaagtttctgcgaaactacccattaatagaaaagaaacagataaacgacagagatataaacttcatcagccgcatctgtctgcgtaacggccgcctgacaattggtgcgccaagcagccccacaatcactaacgccatgatgtatcaattcgacactcttatgtcagcacgttgcgctgaggacaacttctcatatacgcgttacgccgacgacgtgtttgtttcttctcgttcgtacattaacgtgggtgagattatacttttcgtagagaatttactttcgaagtacgagtatgcgtcgctgcgcctgaacaaagacaagaccgcaattctctcacgtaagggacgtcgttccataacgggctgtgtgattaccccgcagcgtggtattagcataggtcgaaagttaaagaagtccataaagcacaagatctacgagagcattaacggtcgattgtcatccttagaggcaactaagttaatgggatatctcggatttcttaaggacattgagccaaattacttcgagtctctgaagaagaagtacggcgctgacgccattaaaacaatcacgtcagggaactacgatgagattaagttggttccattaatattagacgacttagacgatacaccattctga

SEQ ID NO: 311 - DNA, 987 bp, synthetic construct
  source 1..987: mol_type = other DNA
atggctagcgcatggagtcatcctcaattcgaaaaatccggaatggtgtccgatattcttgacaagatttcaaaggatctgctgtgcagtagagatgtgctgttgagaatgtaccaccgggcaccgcacgcctacaagttctacgatatccccaagaagaatggtggtgttagaagaattgctcagccagcgcgagaggttaagaaggtacaacgctgggtcgtagataatatattgtctagcgtaaaaccatcagcattttcaacagcttacctggaaggtagttctattaagaagaacgcatgcatgcacttacataacgcctacatcgccaagttcgacttcaagaacttcttctattccatcaaattctcggatgtgaagagaaccctggaagttaagtacggcatggaagaggggcaatcaaagttcatagcccgtttatgcagtgtgtcaatcgaggggaatctgtgcttatctatcggcgcgccctcatcgccaagcctttcaaatatcgtgatgtacgatttcgacgagtacttagccggaagatgcctgtcgctggacattgtgtacacacgttacgccgacgacatgactttcagctccaatgagaaaggtgtttgcttccaaattgaggggctcattgttgacgccctgagaaacaccgagtcgcccgaattagcgttaaaccacaagaagacaaacttcatctccaagaagtaccggcggacggtgaccggcttgactctgaccaacgataagaagtcgagaatttcgttgggccgcgaccgtaagcgtctgatcaaggctttagtccaccgtagcatcataaacaagcttgataaggaagagctggaaaagctgcaaggactgttaggattcgcttaccataacgagttctctttctacaattccttgtgcgacaagtacgggttcggggttgttagtaaccttatgaagcagaagtcaccgacgataacttga

SEQ ID NO: 312 - DNA, 975 bp, synthetic construct
  source 1..975: mol_type = other DNA
atggctagcgcatggagtcatcctcaattcgaaaaatccggaatggagcttataaataagcttgcaacaaagctcaataaaagcgaatctgaggttatacggtttctcgccagtgcgcctttgaagtataaagtatacacaatacccaagcgtacgagtggacaccgagtcatagcccaaccatcccgggaattaaaggaataccaacgcgccttcatctcactttacagattaaacatccacgatgctgcaatggcctaccgtgagcgcctgagcataaaagataacgccaaatttcactgcaagaaccgttacctgctgaagatagacctggaatcattcttcaactccattaccagtgagttattctggaccatttggcaacagcattatgagatgccgaataacgacgaaaaggtgctgatggagagactgttattctggagtccgggcaagagttctacaggcaaactggtattgtctattggagcaccatcttcccctctgttgtctaacttctttatgtaccaattcgatgagttagttacacgccattgcgagaagttggagattaagtatacacgctatgcggacgacctcacgtttagcaccaatgcgaagaatgtactgttcgacatgccccgatacatttccgacaccctgacgacgttatttggctccgcattaattattaaccgccggaagacggctttcagcagtagagcgcataaccggcacgtgacgggtataaccatagacaacgaatccgaccttagtttagggcgcgagaagaagcgttacatcaaacatctcgtccaccagtaccgcctgaacaagctcgataaagagaacgttttccacttaaagggtttactggccttcgccaaacatatcgaacccaagtttataacatcattagagactaaatactctgctgaggtgatcacgcaaatcttcgaggaacaacatggttga

SEQ ID NO: 313 - DNA, 1002 bp, synthetic construct
  source 1..1002: mol_type = other DNA
atggctagcgcatggagtcatcctcaattcgaaaaatccggaatgtggcgatattgtacagacgaggaagcaataagaagctttcaccttaccgacggtttgcagtgcaaggaaggaaaagagatacaaacgttattcgctgttagcaatcacgccgaagttcactaccacactgcatacattccgaagaagaagggtggccgccgcaagcttctcgtccctgacgcccttcttggacgaattcaaaagaatatcctgcaaaacgtgctcgccgaacgaaaagtgagcccatatgccaaggcctacattaaggggatgggtatcgtagaaaacgcgcttcctcatagtcacgcggagatcctgttaaagctggacattgaggacttcttcgaaaacataacgtatctcatggtataccagaaggcattcccagaaaagtattttccaccagccatacgtaccatgctcgcacacctgtgctgttataatgattacttgccgcagggcgccgtcacatcaccgatgatatcaaacctggttatgtactctttcgacgagtacataggtaagtggtgtggtgagcgcaagatcgcttatacgcggtactcggacgacatgaccttttcgggcgacttcgaggttaaggaagtgaagcataaagttcgtagcttcttggggaaaatgggcttccttttgaatgaagagaagacccgtgtgttaaaacaataccagcgacaaatcgtcaccggtattgtggtcaacgaaggcactaatatctcaaagagttacaaaagatcgatccgtcaagagatctactactgtgagaaatacggagccaaaagtcacctgcagcggcgaaacctttctgagaaggaagaggtcccttacctgaaacagttgttaggaaaggttaattatgttctgcagataaatccggacgacaagaatttccaagaagctaagaagaagatcaaggagatgctcttgaaaattaaaggatga

SEQ ID NO: 314 - DNA, 1044 bp, synthetic construct
  source 1..1044: mol_type = other DNA
atggctagcgcatggagtcatcctcaattcgaaaaatccggaatgataagtacgggactctggaagtactttaccaaggaacaccataaggaattcgtcctgagcctcggtctgctcaacgataccggatggccaattgagaagcagttacgatgtctgtacactgtttctaaccacactgaacgtcattacaccagattaacagttcctaaacgagatggcactattcgggagcttctctcgcctgatccactgttgaagaaaatccagcgtaacattttgcacaatgttctggaagagttacctgtgtccccgcacgccactgcgtaccgtcgaggtgcaggcatactcggcaacgctttcccacaccaaggccgcaagcaagtcgtgaagttggacattcgcgacttttacgggtccataacttttctgatggtgcaccgcgccttcccacgaatctattatccgccatctgtagcaactctgctgactcatttatgctgctatcaagactgcttgccgcaaggagcaccaacctctcccacgatatctaacctggtaatgaagccgtttgacgaccacatgggcacttggtgcaaggagcgtggtatcatatacactcggtattgcgacgacatgacgttttccggtgacttcgatgcggagccgcttattcgtaaggtacgctcattcttattatcgatgggttttgagctcaatgagcgaaagacacagatactgtgcggtggcaagcgccagagcgttacaggcatcgttgttaacgagaagcctcaggtatcacgtgtctatagagataagttgcgacaggagctttattactgccagaagcacggagtagcatcgcatctgctttggttgaacgatcgacagtacctgccgcccgagccagaacaaatcgagcgttaccttcggtcgcttattggtcggattaattatgttcttcaagtggacccactgaatctctacttcgcagaggctcgtacgacaatcgggaatatgataaaggacatggagtcaggttga

SEQ ID NO: 315 - DNA, 1008 bp, synthetic construct
  source 1..1008: mol_type = other DNA
atggctagcgcatggagtcatcctcaattcgaaaaatccggaatggcgtcacctagtcaaacatcgaagttgcgtatgctgggccttccaatctttgatgacctggagagtttcgcccaagtaacgcggttatccaagaagttcttgtatcttcactcttcattttcagaccagcactacaagaagtatttcatacccaagaaatcgggcggtcaacgcgaaatttcacagccgtcaaaggcccacaaggccatacaagggtggattttgcgcaatatcttagatttattacaagtttcacaagcgtcgaaaggtttcgctaagaagcagaccactgccgataacgcaatcccccatataggggctaatgcgatcttatctctcgaccttgaagatttctttccgtctatcacagcaaataaggtgtactctattttccattcattggggtacagcaagccaataagtataatgctgacttcaatctgtacctgcggtggtaagttaccgcaaggctcgccatgttcgccgaagcttgctaaccttgtctgcatcagattagacaatcgcgttcaaggttacgtgggcgcgagaggggttacgtatacccgttacgctgacgacctgacattttctgctgcacatccgggaaagttaatgcatatctttaactttatccggcgcattatcaccgaagagggattctcattgaatgaatcaaagacgagacttgccggaactagacttagaaagaaggtcaccggtcttgtagttacagaaggagcggttggggtgggccgtattaagtaccgagagttgcgatccaaagttttcaaccttactaaaacacaggacatcttctacgaccaaaaggagattaatgaaatctatggttggttaggttatctgaagtccatcgacagtaagcgttacgaaaagcttgtgagtcaaatcgagacacttaagaagaaccacaaggagactagtttagattatctgttagtctga

SEQ ID NO: 316 - DNA, 945 bp, synthetic construct
  source 1..945: mol_type = other DNA
atggctagcgcatggagtcatcctcaattcgaaaaatccggaatgaattactctaatatctcgacactggtcaagcaaatgttgttgaagatacatgatgatatttacaagaagatcaaccaaaactacatcgacgtcttcctgtgcggcggcgtttcctcgagccgtaacatcagtgtacgcgacattattcgtaaggaactcgaaaagaagaagggaatccggatattgtacccggaagagcttttcatggagatccttaacaaggacaaggagtccgaccttttgtccttggagaagttcctggccgacaactgcgacatcatatgcataatttgtgagtcggccgggagtttagtagaattaggtgcattcacgaataatgacgctacggttgggaaggtaattgcagttatcgaggagaagcgcaagaaggataagtccttcattatgctcggtcccatcaaggtgattgaacgtataaacaatcgtaatgttttcttctataacaagaacaagttggaagacctcagcaacgaactttctagagagatcaaacttcgtcgatttcgcggcgtgataaagatcgaaaccgagcaaaacaagccattaaacactattttaggtctgtactacattttgccacttatgttatacttctttaagtcgctggagtacatcgagctgaccaactatctgaagtacttatttaagatcaagggttatgacgacagtgacttcgagtggctgttccggtcgtccttgaaattactgtacaaggaccggtatatttacaagactacagtcaaggagaagacattctatagtcttactcagaaggggtacaataacatctacaacgtcctgtacagtatcgacattaacaacagaacgctgctgtatgattccatacgtctgggcataatcaaaagcgcatactactga

SEQ ID NO: 317 - DNA, 1002 bp, synthetic construct
  source 1..1002: mol_type = other DNA
atggctagcgcatggagtcatcctcaattcgaaaaatccggaatggctaagacagaaataatcaaactgaacatgctgggcttacctgttattcaaagtctggacgacttctcggcggtaacgcatatttctaagtacactatttatcaacttagttaccactctgagaagtactacaagacatacgatatcactaagaagtcaggcggaaagcgtaccatttgtcagccttcacggaaattaaagggactgcaatcttggattcttgtcacaatattgaacaagatccaagtctcccaaagttgcaagggtttccgcaaagactccagtacactcgataacgcaataccgcatataggagctaatactattctgaaccttgatttaaaggatttcttcccgactgtgatatcgaagcaggtgtttaacatctttaagacgatcggctacaataatctgataagcacggttttcactaacatttgtacctttgaaggtaaattaccacaaggtagcccgtcaagccctatgttggcgaacttgtcagcgtggacacttgacttgcgtatacagggttatgttggtaagcggggaataaactatacccgctatgccgacgatttgtcattctctgggttaaatccgagcaaagtagtaaagatcatcccgatgatcaaaactatcatcgatagcgaaaattttgtcgttaatcacaagaagacacgtgttgcttcctcagcgcgtgcgaagacggtaaccggtttggttataaacgaggacagcgttggcatcggaaagcaaaagtataaggatttacgcgccaagattcaccacctgacgttgccgaaggagcaaaagaacgaggaactgctgtaccatgtgtcaggctggattagttatcttaacagcgtcgataagctccgttttaacaaagcaaagaagtacatctccgaattaactaagaagcatccgaagacattaatcgctagactggataaatga

SEQ ID NO: 318 - DNA, 1011 bp, synthetic construct
  source 1..1011: mol_type = other DNA
atggctagcgcatggagtcatcctcaattcgaaaaatccggaatggccaagaacgaaaacattcgcctgaatatgctgggtttgcctattatacaaaccatcgacgatttcagtcaaataacccatctgagcaaatatacgttataccagctgagtgcgcgttcagacttccactacaagaagttcccgagtaagaagaagagtggcggcacacggaccatttgccaaccgtcaaagaatttgaagggtctgcaggcgtggatcctggtcaatatactgaacaaattaaaggtgtcggactcctgcaagggttttgagaaggggagctcgacagcagacaatgcgcgtccgcacataaacgccaactgcatgcttaccatagacctgtcagacttcttcgggaccgttaccgacatacaggtctacaacgtcttcaagtctattggatacaacaagttgatatctacaatgttgacaaacatttgcacatgcgacaacagcttgccgcaaggctctccatgctcacccaaactggccaatttaattacctggaagttggataaacgtattcaaggcttcgttggaaagcgcggaataacgtacacacgttatgctgacgacctgtcattttccggtttacatccggcaaatacagtgcagatcctgccggtagttaaatcgataattgaggatgagggttttcttattaaccctaagaagactcgcgtagccggtgcaaaccgtgcgaaaagaattacgggattagttatctcgaacaatcgctttggggttggtacgaagaaatacaaaatggtccgttcgaaaatttaccacctcactaagctttctgagcagaagaacacaattttgttgaacgaagtaaccggttggatatcttatttaaactcagtggacaagcctcgattccggaaggcgttaaaatatgtcgaagaactgaagaagaagcatccaaagaccctggttgacaaaattaccggctataataactga

SEQ ID NO: 319 - DNA, 1110 bp, synthetic construct
  source 1..1110: mol_type = other DNA
atggctagcgcatggagtcatcctcaattcgaaaaatccggaatgaataacatcaagactaagactaattactttctcctgaataccctgggcttacctattatcgattctttagacagcctttctgacacgctcgcaatctctaagaacatgatctatcttcttagtaagtgcaattacaattattacgtgaagacacacatcccgaagaaggacggcaccaagagagaaattctgattccaaattattcaatgaaaatgacgcagcgatggattttgcaaaacatactctacaagatccgtgtttctgacaacgcaaagggatacaagaaaggaataaaggctccgctggttgagaacgccatgatgcatcatgaacagttgtactgtttaatcttagacgtagagaatttctttccgtcaataggggttaagcggatttgcaacctgtttgagagagtaggatacaattcgttaatctcctacatattagcacgaatctgtacctataaggattacttacctcaaggagcagttactagcccttatcttgccaatttggtttgcttcaaactcgaccggcgcattgacgcgtactgttgcaagcgagaaatcagttacacacgttactgcgatgatctgatattcagctcagacaaccttgacagtctcaagaaggcatacaagatgtttgaagtcatcctttgtaacgagggctttaagctgaatcgacgaaagacgcggtttctgacccctaatacactgaagcaaatcttggggattacgatcaacgacgaactgattaaggccccgaagataatgaagcggaaggtgaaggctctcatcttcaagtctatagtcaacaaggactaccggaagaatgacgttattcgcgggtatatcgcttatatcaagtctattgaaaacaactaccagaacaagattgaaaagtacgtgaaacggctccataataaggattttattcgcggcgacctcgaagtggttaaggcgtacaacgaaaataaactttattcaaattttcccgatttagcctttagcaaggcagcggccttattcttggaaaaccccgagttagaagagttaatgtga

SEQ ID NO: 320 - DNA, 1059 bp, synthetic construct
  source 1..1059: mol_type = other DNA
atggctagcgcatggagtcatcctcaattcgaaaaatccggaatgctttacctggagaagttagtagaatccatggaagggaaatatgagactaagtacatttctttgtgcgctgcttacagcgaacaactgatatcaaagggtatgccagtcatattcgacggccaacacctggcaaagttgctcggtataaatttcagcatcctgtcttattacgtgtactccacaaacaaattctatcaagagttcgagattgacaagaagtccggcggtagtcggaagatcgaggctccaagcagaaatttgaagaagatacagcgttggattttagacaatattttgaacaagttcgagcttaacgaaaacacctacgggttcagaaagggttataatatagtagacaacgcgaagaaccacacgaacaagtttctggtatataacattgatataaaggatttcttcccgtctataacgcgcgaggacgtattctacatcttctataacaagggttacacatacgaggtttcgtatattttctctaaacttttgacatacaagaatcatttaccgcacggcgccccaacttccccttacatcgcaaatttgcgctgtgaaaagatggattatagccttaatgtatacacgaagcgtatcaacgcggactattcccggtacgcagacgacataacaatatcaaccaacaacgctcacgactttatagacaacatcaaaatcataaagaaaatcatcacgaacaatggcttcgtgctgaatgagaagaaggagcgtatacagtactacaaaagcatgcaggaagtgactggattgatcgttaataacggtgtaaaagtacggcgtcgcttcaagaaggacctggaaaaggagatttattactgtcttaagtatggtgttagctcgcatctgacacgtacagaaaagaatcatttgtctttctacaaggagtacctttacggaaaggtcaacttcattaagatggtcgagcccgagttagcggaattctatttaaagcaactttctgagattaactggtactcctga

SEQ ID NO: 321 - DNA, 1458 bp, synthetic construct
  source 1..1458: mol_type = other DNA
atggctagcgcatggagtcatcctcaattcgaaaaatccggaatggctacagatacattggcttgggcagacgtggacgcagcgggcggaattcgtgcgtgggtggacgccgaggtcgcacgtcagggcttagctgacccaggagctacacaatcgacatcagaggccaagtctcggggagtgggaactcctaccgcgtctccggcgggccgtggatcaagtccggttgagaagatgtccgacgcggagctgaagttatacaaagcacgccgcgatgaggagcggcgtgtacgccgcgagttgtaccggcgggcttggcaagcctaccgtagatcgcatatcgtacacttgggcccaggggtattttggcacgacacggccgacgttgaccgattcgacgcagacgatccggaacgtaagcgccaagataacgcactccctgcactggcagacgttgaggcactggccaaggctttgggtttgacgatagcacggttgcgttggcttgcgtatcatagagatgtcgacactgggacgcattatcaccgctggttggtaccaaagagagacggaactccccgcttaattagcgcgcccaaacccgagttgaaggccgctcaacgatggattatgcgtgaagtaactgagcacctgcccatgcacggggcggcacatggctttatccctggaagaagcatagcttccaatgcagttgttcacgccggtgcgcgggtagtagtgaagcttgatattcgtggattttacccgaccgtaacaatgcgccgtgtgaagggtctgctgcgccgcgcaggactcggtgaacaggttgccactgtgatggctctgttggcaaccgagtcaccgcgagagaaggttgagacacacgggaagacgcactacgttgccctgggcccacgatcgctcccgcaaggcgcgccaacttctccgagtataacaaacgccttatgcctgcggctggactgtcggttgagtgggctggccagaaagctggactgccggtacacacgctatgctgacgatctcaccttttcttggcacggagcggcacgtgcacaaataggtagtctgctgcgtgctgtgggcaagatcgtacgggctgaaggcttcgaggtgcatatgaagaagacgagagtgatgcgcgcgggcgctcgtcaaaaggtaacaggattaatagtgaaccaagcacccccagatcgaccagccgcgcgtgtccctcgtgacacgcaacgtaaactgagagcagccatacgcaaccgcgaattgggccggccgggaaaaggcgagactttagaccaacttaagggcatggcagcattcgtcatgatgaccgaccctgcccggggacgtgcattcatggagagaattgagcgtctgattgcggccggaacacaaggtgccgatggtgcacccgggacgccggaacgtggctcaccctga

SEQ ID NO: 322 - DNA, 1578 bp, synthetic construct
  source 1..1578: mol_type = other DNA
atggctagcgcatggagtcatcctcaattcgaaaaatccggaatgtcagaccaaacgtcgacgacggaacccgccccatcagcagacacaccttcggcactggcatcagctgatgggcagccatcaggagctgaggcgtgggccgagatcgatgaagctggtggcatccgggcctgggtacaggctgagttgacgcgccgtggtttaatcgacgacgctgatacaacgagcatgtcagacaaggagagaaagcgttaccgggcgcgtcgagatgaggagcgccgggttcgtcgtctgttggaagctcgcgcatgggctgcataccgtcaagcgcatctggtgcacgtaggtcttggtgttttctggcatgacaccgccgattacgatcgatatgatattgctgaacccgaagtccgtcgccaagataacgatctgcccgcactggccgatgtccaagcgctggcgcgcgcgttggcactccctatcccgcgtctgagatggctcgtgtaccacagagaagtggactcaggcacacattaccaccgttggacagtccccaaacgcagtggcggtgaacgactgataagcgcgcctaagccaacgcttaaaagagcacaaacttggatagcgcgcaacatcactgagcacctgccggtccacggtgcagcgcatggtttcttacctggacgtagcaccgccactaacgccgccgcacacgctggtgcagcagttgttgttaagcttgacctgcgtgatttctatccttctataaccttaccccgggttaagggcgtcttccgcaaggccgggtacggagagcaagtcgctacagcgctggcacttttatgcaccgagtcgccgcgtgaagagatggtcgtgcacggtcggcgttatcacgtggcagttgggtcccggtcccttccgcaaggtgcgcctactagcccctctatcacgaacgctcttagcctgaaacttgactgcagactcgacgggttagcccgcaagttaggattccgttacacacggtacgccgacgacctcaccttctcctggcaccaagatgaggacgcgcctgtggggcggttaattcgggcagtcgaacggattacagcggaagagggctttgctgttcacgagaagaaaacacggataatgagagccggccgacggcaaaaggttacaggactcgttgttaatagacttccccgacggccttccgggcaagctagcgatgagtccagaggacaaccgtctgaggagccgttgggtcatggcgcatctggtcaagagcctggagttggagctccgcgggcccgtgtgccacgtaagttagttcggcacttgagagctgctatacacaaccgggcgcaagggaagcctgggcaaggcgagactcttgctcaacttcgtggttgggccgcatacgtgcacatgacagatcccgcccgtggtcgcgcgttcttagaccaattggaccggttagcctctgccggggtgggtgacgagacaggcgcaggtgctggtgacgaggctagcgccggcacaagtgatctgccagcgaccggagacaagagttga

SEQ ID NO: 323 - DNA, 1944 bp, synthetic construct
  source 1..1944: mol_type = other DNA
atggctagcgcatggagtcatcctcaattcgaaaaatccggaatgtcagatcaagctcgtcgcgcggctatacaagcacggattgcacagtcatctcgtgacgacgtcatccttgatgaaatgatacgtttgggcttttgggatgctggtggtgacccacacgctgcggagcttactgaaataatggcgcgatctaaggaaatccgttctgaattgagtcaactcaatagccaaaatgcccgttacttagaccctgaggcagccttaaaggcgatgcatgcggagcgcaaggcagcagctctcgctcgtcggaaggagacaaaactggcccgggcgcgagcgcgccaggcgcgggcagaggcgtgggctcaaagatcccgcgacgcggtctggcatctgggtcctggtgtgtccgctgcacttgaacagggcgagggcaagtccgcgccgcggtcgttagcgccggggcttccagctcttgccacaccagcagcggtagcgagcgctatgggtgttagcactggcgaactccgattcctggcgtacgcccgcccaatgtccagagtctctcattataagcgtttcgaaataactaagaaaagcggtggaaaacgtgtgatatcagccccaatgccgcggcttaagtatgcacaatactggcttctggacgctgtcttatccaagttacctcttcacccggctgcacacggtttcgtgccgggaagatccatacttacaaatgcccggccccatgtaggcagagatgttgtggcgaatatggatctccgggatttcttcccaacgctcgacgatcggcgtgtcaaggggcttttcgagtcgttgggctacggcgaggacgtcgcacaagttctcgctttaatcgcgaccgagcctgtaactgacgaaatagagattgatggccgggttacacacttggcccggtccccaagaagacgcttaccacaaggcgccccatgttcccctgctataaccaacctgatctgtcgcagattagacgctcggctggcaggcctcgcggctaagcttggcttcgcgtacacgcgttacgcggatgatttaacattcagcgcttcgggcgaagacgcaaagaaggttggagctttgctgagagcagcccaagaaatcgttcgtgcagaaggtttcgaacctcacccagacaaaacccgcgtcatgagaagaggtgcacgacaggaagtgacaggtctggtagtcaacgaccgtctgggagcaccacgtgaggccgtcagacgggcacgtgctgcacttcatcgggcggaacgtcaaggtgtggcgggattgaagtttggtagcggtcgcgatgcattggcggggctggtaggcttcgcccaatttgtagcaatgatagatccacggcaaggcgcttctcttgtagcccgtgcacgggctctgcgcagaggcgctgacgaaggggcaacgtccatgttgagtagagcgggactcgcgcgagcgggccttggggctgccgcactgagaaaggctgctgctgcaggggccccaccagaagcaatgcgctggcgcccggcggagcgaccagctccaactctcgaccccgtcttggttgaggctgaacgagctgcggcagccaaagcgcggcgagaggctgagaaggaaggatcacgccaagcgaaatccgcacgaagcggtacgtcagtaccaccagtacgtggcgctggtacaggcgcgagtggtggtggtggacccgctcgtgccgtctggggacgtactgcgaccccggagttgggtgagtcttctgccgagtgggcacgtccggcaaccccacgacgaagtttctggtcgttagcggtgaccggttggcttatactgatggcccttgcggtcttgccatttgccccctggcttacggcgttgttgggctatttagtttatcgacggttacgctga

SEQ ID NO: 324 - DNA, 1413 bp, synthetic construct
  source 1..1413: mol_type = other DNA
atgaagccgattataatcgaagacggtcggacgatagtgttagcccgtgggtacttctcgccccacagatacgggacgggtcgattcggcggcttcaatcagattcaggacgggctccttgcagaccctgagctgctgcgtcaagttgtatccaccatcatgtgcccagaagagagaacgttgattcctgagaatgacttctatcctgaatgctgggagccagagaagtatgaagcggatggtccgcttggctccatagacgctttcttcactacgttccgccgcatcgccagacacgatatgtactgttccactgttgagcaaggcgaatgggtcatggcttacggtacggaacaacttacctaccggcgaatgaaccggccactcgacgacaagcatttccgtttaaagtcaatccgattaccggacgagagcgaccgggcgttggtcaagaagtgctttgaatttcgcgtggcacccgccatcacgcattgcttaatcgtgggtcgggcattcatgcgtgaggacaaaccgatgtataagcacttcaagaaacgcactaccagcaaagtgcgtgatatttgggcaccggagcccgaggtaaaggcagccttacgtcatttattgcacccgctgaattcggcgtacgacatgaagcggtctggttcaccgcaatacgcttacacaaaagaccgcaatatcttaatgaacgcggagccgcacgcacgcaacaagtggatgcttaacgcggatattacgggcttctttgatcactgcgactgggacctggttaagggttacatgagattcctcatgaaagacatctccgctgaagacaaagctgttcttaaagttatgttaattaacccagccacgggtggcctgtaccaaggtagtcccgtatcgggagctctgtcaaacgcgatcctcagacccgcggccaagtacatgaaagctttctttcaaaaggaaggacgtaccctgaccgtatatgccgatgacataactgtgtctcagggagcagccatcgattcaacagttcgtaagaacatcgtcggtaaaattcgtcatgccttcgagaagttcgacctgccgtttgaccttaagccgtctaaaacacgtgttagcagaaacaacggtcggaaagtcaccggtattagaatcaaccatcttgatcaatgcacgatcccactgccgaagtatagattgttgcgttcgatgctgcaccgtatgagttcgggtggtgacgtgaccatggcaaaatcccaacttaaggggtatcttgagttcgcgcgattcaatgatcgttccggtaagattgaccgtttgatcgacaagtaccgcgacgtcttggtggacaagggcatgataagaccaattctggacccgcagccagtagagatccctgaggag

SEQ ID NO: 325 - DNA, 1623 bp, synthetic construct
  source 1..1623: mol_type = other DNA
atggatgacaagaacaagttgtacctgattaatgatggaaagacgatcgtaacccgtttcggtgcaatcactccattccatcaaagcaagaagtacgaggatacgttgaagatcccggaaaagtttctggaagacccggaaagtctccggcaattgatcggattcaagctcttcgaagaccgcacgaagatcataaataagaacgatttctacatgcgggacccacaagtatataagaaggggaaacaaaccacattaattagcttcttacaggcagcacataaggtgatgcgccttcactacgagaattatagagtcgaaattttcagtaagtacgtagttgtgttaaattgtcccactattaagtttaccggtacacaagtaaaagagacgtgccatatcgactcaaagacagcgaacggcgagcgaaagcctctgctgatcagtgcctgctataaggtcgaggacgatgacgaacgcacgaagatcttcgacctgctgacgcttaagtacgcccccgcgatcatagacgtgtatattactacactgcgtttggaagcggccgggacgaagctgtaccagtactataaggttccaactagcactaaggtccgggagatatgggcaccagaagatagtctgaaagattctatgcgacatctcttgttgccgctcacgtcggcgtacgacatgaagaagaagaacagtacgcaatacgcttatatcaaggagcggtcgatcgtgaacaacgccgaggtgcataaggacaacaaatatatcgcgaaattcgacattaaaggtttcttcgacttttgtaactgggatctttcttggaaatacctcaagttcctcttcccgaaggataaatacggcaagaaggccgagctgtacgacgacgtaaagaacacgttaaaacgcgtgattattaatgaacaaactggtggactgttccaagggaaccctgtctcgggtgttatttctaatgctatacttcgtccattctctaactacatactgaacatcctggaaaagcaagcagatgtcaagaatggggtgttcccgtctatcaatgagaagaatgcggagactgagagtatcgacccagagggtaacattacaaccaagttcgacgggaaggaatacaagtccttcagcaaatatacggatccgagcaacgaagacttacgttacgccgtatcagtttatgcggatgatataacggtgtcgtctaattaccctatagactggaacgaggcaaagcgcatcagcggtatattgcgatactcgttcgagcacctggagttgcctttcaagctgaacctgaagaagacttctattgcccgtaataatggtcgtaagatcactggcgtacggatcaaccataacgatgttatggttgtatcgcgggtgaagtacatgcttctcaagtcaatgtgtcaccggatcaaacacggtaagaaaatctcaatgccgaagaatgtcttccaaggcaacttagcatacgcccgtttcgtggatcacagtggaaagattgagactctcatagctaaataccacgctaacttggttgaatttggaatcaacttgaagttacccggagagcttgcggactcgtatgtcgag

SEQ ID NO: 326 - DNA, 972 bp, synthetic construct
  source 1..972: mol_type = other DNA
atgttactggaaaagctgcaaatacaatctaaccagtctctcgaacgcttagagcgattcgcaacgtcagcgtccaagcggtacaaggttttccaaatcccgaagcgttccggtggcttccgtataatagaacagccgtcaaaggagatcaaggcgatccagagatggttgatagaggcgttattcgacgaatttcccatccaccattcagcaaccgcatatatacggggcaagaatatacgatcgaacgccgaggtccacgcggagagtaacttcacattgaagctggactttgagaacttctttccttctttcacggagcgccacttaatcaagtttctgcgaaactacccattaatagaaaagaaacagataaacgacagagatataaacttcatcagccgcatctgtctgcgtaacggccgcctgacaattggtgcgccaagcagccccacaatcactaacgccatgatgtatcaattcgacactcttatgtcagcacgttgcgctgaggacaacttctcatatacgcgttacgccgacgacgtgtttgtttcttctcgttcgtacattaacgtgggtgagattatacttttcgtagagaatttactttcgaagtacgagtatgcgtcgctgcgcctgaacaaagacaagaccgcaattctctcacgtaagggacgtcgttccataacgggctgtgtgattaccccgcagcgtggtattagcataggtcgaaagttaaagaagtccataaagcacaagatctacgagagcattaacggtcgattgtcatccttagaggcaactaagttaatgggatatctcggatttcttaaggacattgagccaaattacttcgagtctctgaagaagaagtacggcgctgacgccattaaaacaatcacgtcagggaactacgatgagattaagttggttccattaatattagacgacttagacgatacaccattc

SEQ ID NO: 327 - DNA, 942 bp, synthetic construct
  source 1..942: mol_type = other DNA
atggtgtccgatattcttgacaagatttcaaaggatctgctgtgcagtagagatgtgctgttgagaatgtaccaccgggcaccgcacgcctacaagttctacgatatccccaagaagaatggtggtgttagaagaattgctcagccagcgcgagaggttaagaaggtacaacgctgggtcgtagataatatattgtctagcgtaaaaccatcagcattttcaacagcttacctggaaggtagttctattaagaagaacgcatgcatgcacttacataacgcctacatcgccaagttcgacttcaagaacttcttctattccatcaaattctcggatgtgaagagaaccctggaagttaagtacggcatggaagaggggcaatcaaagttcatagcccgtttatgcagtgtgtcaatcgaggggaatctgtgcttatctatcggcgcgccctcatcgccaagcctttcaaatatcgtgatgtacgatttcgacgagtacttagccggaagatgcctgtcgctggacattgtgtacacacgttacgccgacgacatgactttcagctccaatgagaaaggtgtttgcttccaaattgaggggctcattgttgacgccctgagaaacaccgagtcgcccgaattagcgttaaaccacaagaagacaaacttcatctccaagaagtaccggcggacggtgaccggcttgactctgaccaacgataagaagtcgagaatttcgttgggccgcgaccgtaagcgtctgatcaaggctttagtccaccgtagcatcataaacaagcttgataaggaagagctggaaaagctgcaaggactgttaggattcgcttaccataacgagttctctttctacaattccttgtgcgacaagtacgggttcggggttgttagtaaccttatgaagcagaagtcaccgacgataact

SEQ ID NO: 328 - DNA, 930 bp, synthetic construct
  source 1..930: mol_type = other DNA
atggagcttataaataagcttgcaacaaagctcaataaaagcgaatctgaggttatacggtttctcgccagtgcgcctttgaagtataaagtatacacaatacccaagcgtacgagtggacaccgagtcatagcccaaccatcccgggaattaaaggaataccaacgcgccttcatctcactttacagattaaacatccacgatgctgcaatggcctaccgtgagcgcctgagcataaaagataacgccaaatttcactgcaagaaccgttacctgctgaagatagacctggaatcattcttcaactccattaccagtgagttattctggaccatttggcaacagcattatgagatgccgaataacgacgaaaaggtgctgatggagagactgttattctggagtccgggcaagagttctacaggcaaactggtattgtctattggagcaccatcttcccctctgttgtctaacttctttatgtaccaattcgatgagttagttacacgccattgcgagaagttggagattaagtatacacgctatgcggacgacctcacgtttagcaccaatgcgaagaatgtactgttcgacatgccccgatacatttccgacaccctgacgacgttatttggctccgcattaattattaaccgccggaagacggctttcagcagtagagcgcataaccggcacgtgacgggtataaccatagacaacgaatccgaccttagtttagggcgcgagaagaagcgttacatcaaacatctcgtccaccagtaccgcctgaacaagctcgataaagagaacgttttccacttaaagggtttactggccttcgccaaacatatcgaacccaagtttataacatcattagagactaaatactctgctgaggtgatcacgcaaatcttcgaggaacaacatggt

SEQ ID NO: 329 - DNA, 957 bp, synthetic construct
  source 1..957: mol_type = other DNA
atgtggcgatattgtacagacgaggaagcaataagaagctttcaccttaccgacggtttgcagtgcaaggaaggaaaagagatacaaacgttattcgctgttagcaatcacgccgaagttcactaccacactgcatacattccgaagaagaagggtggccgccgcaagcttctcgtccctgacgcccttcttggacgaattcaaaagaatatcctgcaaaacgtgctcgccgaacgaaaagtgagcccatatgccaaggcctacattaaggggatgggtatcgtagaaaacgcgcttcctcatagtcacgcggagatcctgttaaagctggacattgaggacttcttcgaaaacataacgtatctcatggtataccagaaggcattcccagaaaagtattttccaccagccatacgtaccatgctcgcacacctgtgctgttataatgattacttgccgcagggcgccgtcacatcaccgatgatatcaaacctggttatgtactctttcgacgagtacataggtaagtggtgtggtgagcgcaagatcgcttatacgcggtactcggacgacatgaccttttcgggcgacttcgaggttaaggaagtgaagcataaagttcgtagcttcttggggaaaatgggcttccttttgaatgaagagaagacccgtgtgttaaaacaataccagcgacaaatcgtcaccggtattgtggtcaacgaaggcactaatatctcaaagagttacaaaagatcgatccgtcaagagatctactactgtgagaaatacggagccaaaagtcacctgcagcggcgaaacctttctgagaaggaagaggtcccttacctgaaacagttgttaggaaaggttaattatgttctgcagataaatccggacgacaagaatttccaagaagctaagaagaagatcaaggagatgctcttgaaaattaaagga

SEQ ID NO: 330 - DNA, 999 bp, synthetic construct
  source 1..999: mol_type = other DNA
atgataagtacgggactctggaagtactttaccaaggaacaccataaggaattcgtcctgagcctcggtctgctcaacgataccggatggccaattgagaagcagttacgatgtctgtacactgtttctaaccacactgaacgtcattacaccagattaacagttcctaaacgagatggcactattcgggagcttctctcgcctgatccactgttgaagaaaatccagcgtaacattttgcacaatgttctggaagagttacctgtgtccccgcacgccactgcgtaccgtcgaggtgcaggcatactcggcaacgctttcccacaccaaggccgcaagcaagtcgtgaagttggacattcgcgacttttacgggtccataacttttctgatggtgcaccgcgccttcccacgaatctattatccgccatctgtagcaactctgctgactcatttatgctgctatcaagactgcttgccgcaaggagcaccaacctctcccacgatatctaacctggtaatgaagccgtttgacgaccacatgggcacttggtgcaaggagcgtggtatcatatacactcggtattgcgacgacatgacgttttccggtgacttcgatgcggagccgcttattcgtaaggtacgctcattcttattatcgatgggttttgagctcaatgagcgaaagacacagatactgtgcggtggcaagcgccagagcgttacaggcatcgttgttaacgagaagcctcaggtatcacgtgtctatagagataagttgcgacaggagctttattactgccagaagcacggagtagcatcgcatctgctttggttgaacgatcgacagtacctgccgcccgagccagaacaaatcgagcgttaccttcggtcgcttattggtcggattaattatgttcttcaagtggacccactgaatctctacttcgcagaggctcgtacgacaatcgggaatatgataaaggacatggagtcaggt

SEQ ID NO: 331 - DNA, 963 bp, synthetic construct
  source 1..963: mol_type = other DNA
atggcgtcacctagtcaaacatcgaagttgcgtatgctgggccttccaatctttgatgacctggagagtttcgcccaagtaacgcggttatccaagaagttcttgtatcttcactcttcattttcagaccagcactacaagaagtatttcatacccaagaaatcgggcggtcaacgcgaaatttcacagccgtcaaaggcccacaaggccatacaagggtggattttgcgcaatatcttagatttattacaagtttcacaagcgtcgaaaggtttcgctaagaagcagaccactgccgataacgcaatcccccatataggggctaatgcgatcttatctctcgaccttgaagatttctttccgtctatcacagcaaataaggtgtactctattttccattcattggggtacagcaagccaataagtataatgctgacttcaatctgtacctgcggtggtaagttaccgcaaggctcgccatgttcgccgaagcttgctaaccttgtctgcatcagattagacaatcgcgttcaaggttacgtgggcgcgagaggggttacgtatacccgttacgctgacgacctgacattttctgctgcacatccgggaaagttaatgcatatctttaactttatccggcgcattatcaccgaagagggattctcattgaatgaatcaaagacgagacttgccggaactagacttagaaagaaggtcaccggtcttgtagttacagaaggagcggttggggtgggccgtattaagtaccgagagttgcgatccaaagttttcaaccttactaaaacacaggacatcttctacgaccaaaaggagattaatgaaatctatggttggttaggttatctgaagtccatcgacagtaagcgttacgaaaagcttgtgagtcaaatcgagacacttaagaagaaccacaaggagactagtttagattatctgttagtc

SEQ ID NO: 332 - DNA, 900 bp, synthetic construct
  source 1..900: mol_type = other DNA
atgaattactctaatatctcgacactggtcaagcaaatgttgttgaagatacatgatgatatttacaagaagatcaaccaaaactacatcgacgtcttcctgtgcggcggcgtttcctcgagccgtaacatcagtgtacgcgacattattcgtaaggaactcgaaaagaagaagggaatccggatattgtacccggaagagcttttcatggagatccttaacaaggacaaggagtccgaccttttgtccttggagaagttcctggccgacaactgcgacatcatatgcataatttgtgagtcggccgggagtttagtagaattaggtgcattcacgaataatgacgctacggttgggaaggtaattgcagttatcgaggagaagcgcaagaaggataagtccttcattatgctcggtcccatcaaggtgattgaacgtataaacaatcgtaatgttttcttctataacaagaacaagttggaagacctcagcaacgaactttctagagagatcaaacttcgtcgatttcgcggcgtgataaagatcgaaaccgagcaaaacaagccattaaacactattttaggtctgtactacattttgccacttatgttatacttctttaagtcgctggagtacatcgagctgaccaactatctgaagtacttatttaagatcaagggttatgacgacagtgacttcgagtggctgttccggtcgtccttgaaattactgtacaaggaccggtatatttacaagactacagtcaaggagaagacattctatagtcttactcagaaggggtacaataacatctacaacgtcctgtacagtatcgacattaacaacagaacgctgctgtatgattccatacgtctgggcataatcaaaagcgcatactac

SEQ ID NO: 333 - DNA, 957 bp, synthetic construct
  source 1..957: mol_type = other DNA
atggctaagacagaaataatcaaactgaacatgctgggcttacctgttattcaaagtctggacgacttctcggcggtaacgcatatttctaagtacactatttatcaacttagttaccactctgagaagtactacaagacatacgatatcactaagaagtcaggcggaaagcgtaccatttgtcagccttcacggaaattaaagggactgcaatcttggattcttgtcacaatattgaacaagatccaagtctcccaaagttgcaagggtttccgcaaagactccagtacactcgataacgcaataccgcatataggagctaatactattctgaaccttgatttaaaggatttcttcccgactgtgatatcgaagcaggtgtttaacatctttaagacgatcggctacaataatctgataagcacggttttcactaacatttgtacctttgaaggtaaattaccacaaggtagcccgtcaagccctatgttggcgaacttgtcagcgtggacacttgacttgcgtatacagggttatgttggtaagcggggaataaactatacccgctatgccgacgatttgtcattctctgggttaaatccgagcaaagtagtaaagatcatcccgatgatcaaaactatcatcgatagcgaaaattttgtcgttaatcacaagaagacacgtgttgcttcctcagcgcgtgcgaagacggtaaccggtttggttataaacgaggacagcgttggcatcggaaagcaaaagtataaggatttacgcgccaagattcaccacctgacgttgccgaaggagcaaaagaacgaggaactgctgtaccatgtgtcaggctggattagttatcttaacagcgtcgataagctccgttttaacaaagcaaagaagtacatctccgaattaactaagaagcatccgaagacattaatcgctagactggataaa

SEQ ID NO: 334 - DNA, 966 bp, synthetic construct
  source 1..966: mol_type = other DNA
atggccaagaacgaaaacattcgcctgaatatgctgggtttgcctattatacaaaccatcgacgatttcagtcaaataacccatctgagcaaatatacgttataccagctgagtgcgcgttcagacttccactacaagaagttcccgagtaagaagaagagtggcggcacacggaccatttgccaaccgtcaaagaatttgaagggtctgcaggcgtggatcctggtcaatatactgaacaaattaaaggtgtcggactcctgcaagggttttgagaaggggagctcgacagcagacaatgcgcgtccgcacataaacgccaactgcatgcttaccatagacctgtcagacttcttcgggaccgttaccgacatacaggtctacaacgtcttcaagtctattggatacaacaagttgatatctacaatgttgacaaacatttgcacatgcgacaacagcttgccgcaaggctctccatgctcacccaaactggccaatttaattacctggaagttggataaacgtattcaaggcttcgttggaaagcgcggaataacgtacacacgttatgctgacgacctgtcattttccggtttacatccggcaaatacagtgcagatcctgccggtagttaaatcgataattgaggatgagggttttcttattaaccctaagaagactcgcgtagccggtgcaaaccgtgcgaaaagaattacgggattagttatctcgaacaatcgctttggggttggtacgaagaaatacaaaatggtccgttcgaaaatttaccacctcactaagctttctgagcagaagaacacaattttgttgaacgaagtaaccggttggatatcttatttaaactcagtggacaagcctcgattccggaaggcgttaaaatatgtcgaagaactgaagaagaagcatccaaagaccctggttgacaaaattaccggctataataac

SEQ ID NO: 335 - DNA, 1065 bp, synthetic construct
  source 1..1065: mol_type = other DNA
atgaataacatcaagactaagactaattactttctcctgaataccctgggcttacctattatcgattctttagacagcctttctgacacgctcgcaatctctaagaacatgatctatcttcttagtaagtgcaattacaattattacgtgaagacacacatcccgaagaaggacggcaccaagagagaaattctgattccaaattattcaatgaaaatgacgcagcgatggattttgcaaaacatactctacaagatccgtgtttctgacaacgcaaagggatacaagaaaggaataaaggctccgctggttgagaacgccatgatgcatcatgaacagttgtactgtttaatcttagacgtagagaatttctttccgtcaataggggttaagcggatttgcaacctgtttgagagagtaggatacaattcgttaatctcctacatattagcacgaatctgtacctataaggattacttacctcaaggagcagttactagcccttatcttgccaatttggtttgcttcaaactcgaccggcgcattgacgcgtactgttgcaagcgagaaatcagttacacacgttactgcgatgatctgatattcagctcagacaaccttgacagtctcaagaaggcatacaagatgtttgaagtcatcctttgtaacgagggctttaagctgaatcgacgaaagacgcggtttctgacccctaatacactgaagcaaatcttggggattacgatcaacgacgaactgattaaggccccgaagataatgaagcggaaggtgaaggctctcatcttcaagtctatagtcaacaaggactaccggaagaatgacgttattcgcgggtatatcgcttatatcaagtctattgaaaacaactaccagaacaagattgaaaagtacgtgaaacggctccataataaggattttattcgcggcgacctcgaagtggttaaggcgtacaacgaaaataaactttattcaaattttcccgatttagcctttagcaaggcagcggccttattcttggaaaaccccgagttagaagagttaatg

SEQ ID NO: 336 - DNA, 1014 bp, synthetic construct
  source 1..1014: mol_type = other DNA
atgctttacctggagaagttagtagaatccatggaagggaaatatgagactaagtacatttctttgtgcgctgcttacagcgaacaactgatatcaaagggtatgccagtcatattcgacggccaacacctggcaaagttgctcggtataaatttcagcatcctgtcttattacgtgtactccacaaacaaattctatcaagagttcgagattgacaagaagtccggcggtagtcggaagatcgaggctccaagcagaaatttgaagaagatacagcgttggattttagacaatattttgaacaagttcgagcttaacgaaaacacctacgggttcagaaagggttataatatagtagacaacgcgaagaaccacacgaacaagtttctggtatataacattgatataaaggatttcttcccgtctataacgcgcgaggacgtattctacatcttctataacaagggttacacatacgaggtttcgtatattttctctaaacttttgacatacaagaatcatttaccgcacggcgccccaacttccccttacatcgcaaatttgcgctgtgaaaagatggattatagccttaatgtatacacgaagcgtatcaacgcggactattcccggtacgcagacgacataacaatatcaaccaacaacgctcacgactttatagacaacatcaaaatcataaagaaaatcatcacgaacaatggcttcgtgctgaatgagaagaaggagcgtatacagtactacaaaagcatgcaggaagtgactggattgatcgttaataacggtgtaaaagtacggcgtcgcttcaagaaggacctggaaaaggagatttattactgtcttaagtatggtgttagctcgcatctgacacgtacagaaaagaatcatttgtctttctacaaggagtacctttacggaaaggtcaacttcattaagatggtcgagcccgagttagcggaattctatttaaagcaactttctgagattaactggtactcc

SEQ ID NO: 337 - DNA, 1413 bp, synthetic construct
  source 1..1413: mol_type = other DNA
atggctacagatacattggcttgggcagacgtggacgcagcgggcggaattcgtgcgtgggtggacgccgaggtcgcacgtcagggcttagctgacccaggagctacacaatcgacatcagaggccaagtctcggggagtgggaactcctaccgcgtctccggcgggccgtggatcaagtccggttgagaagatgtccgacgcggagctgaagttatacaaagcacgccgcgatgaggagcggcgtgtacgccgcgagttgtaccggcgggcttggcaagcctaccgtagatcgcatatcgtacacttgggcccaggggtattttggcacgacacggccgacgttgaccgattcgacgcagacgatccggaacgtaagcgccaagataacgcactccctgcactggcagacgttgaggcactggccaaggctttgggtttgacgatagcacggttgcgttggcttgcgtatcatagagatgtcgacactgggacgcattatcaccgctggttggtaccaaagagagacggaactccccgcttaattagcgcgcccaaacccgagttgaaggccgctcaacgatggattatgcgtgaagtaactgagcacctgcccatgcacggggcggcacatggctttatccctggaagaagcatagcttccaatgcagttgttcacgccggtgcgcgggtagtagtgaagcttgatattcgtggattttacccgaccgtaacaatgcgccgtgtgaagggtctgctgcgccgcgcaggactcggtgaacaggttgccactgtgatggctctgttggcaaccgagtcaccgcgagagaaggttgagacacacgggaagacgcactacgttgccctgggcccacgatcgctcccgcaaggcgcgccaacttctccgagtataacaaacgccttatgcctgcggctggactgtcggttgagtgggctggccagaaagctggactgccggtacacacgctatgctgacgatctcaccttttcttggcacggagcggcacgtgcacaaataggtagtctgctgcgtgctgtgggcaagatcgtacgggctgaaggcttcgaggtgcatatgaagaagacgagagtgatgcgcgcgggcgctcgtcaaaaggtaacaggattaatagtgaaccaagcacccccagatcgaccagccgcgcgtgtccctcgtgacacgcaacgtaaactgagagcagccatacgcaaccgcgaattgggccggccgggaaaaggcgagactttagaccaacttaagggcatggcagcattcgtcatgatgaccgaccctgcccggggacgtgcattcatggagagaattgagcgtctgattgcggccggaacacaaggtgccgatggtgcacccgggacgccggaacgtggctcaccc

SEQ ID NO: 338 - DNA, 1533 bp, synthetic construct
  source 1..1533: mol_type = other DNA
atgtcagaccaaacgtcgacgacggaacccgccccatcagcagacacaccttcggcactggcatcagctgatgggcagccatcaggagctgaggcgtgggccgagatcgatgaagctggtggcatccgggcctgggtacaggctgagttgacgcgccgtggtttaatcgacgacgctgatacaacgagcatgtcagacaaggagagaaagcgttaccgggcgcgtcgagatgaggagcgccgggttcgtcgtctgttggaagctcgcgcatgggctgcataccgtcaagcgcatctggtgcacgtaggtcttggtgttttctggcatgacaccgccgattacgatcgatatgatattgctgaacccgaagtccgtcgccaagataacgatctgcccgcactggccgatgtccaagcgctggcgcgcgcgttggcactccctatcccgcgtctgagatggctcgtgtaccacagagaagtggactcaggcacacattaccaccgttggacagtccccaaacgcagtggcggtgaacgactgataagcgcgcctaagccaacgcttaaaagagcacaaacttggatagcgcgcaacatcactgagcacctgccggtccacggtgcagcgcatggtttcttacctggacgtagcaccgccactaacgccgccgcacacgctggtgcagcagttgttgttaagcttgacctgcgtgatttctatccttctataaccttaccccgggttaagggcgtcttccgcaaggccgggtacggagagcaagtcgctacagcgctggcacttttatgcaccgagtcgccgcgtgaagagatggtcgtgcacggtcggcgttatcacgtggcagttgggtcccggtcccttccgcaaggtgcgcctactagcccctctatcacgaacgctcttagcctgaaacttgactgcagactcgacgggttagcccgcaagttaggattccgttacacacggtacgccgacgacctcaccttctcctggcaccaagatgaggacgcgcctgtggggcggttaattcgggcagtcgaacggattacagcggaagagggctttgctgttcacgagaagaaaacacggataatgagagccggccgacggcaaaaggttacaggactcgttgttaatagacttccccgacggccttccgggcaagctagcgatgagtccagaggacaaccgtctgaggagccgttgggtcatggcgcatctggtcaagagcctggagttggagctccgcgggcccgtgtgccacgtaagttagttcggcacttgagagctgctatacacaaccgggcgcaagggaagcctgggcaaggcgagactcttgctcaacttcgtggttgggccgcatacgtgcacatgacagatcccgcccgtggtcgcgcgttcttagaccaattggaccggttagcctctgccggggtgggtgacgagacaggcgcaggtgctggtgacgaggctagcgccggcacaagtgatctgccagcgaccggagacaagagt

SEQ ID NO: 339 - DNA, 1899 bp, synthetic construct
  source 1..1899: mol_type = other DNA
atgtcagatcaagctcgtcgcgcggctatacaagcacggattgcacagtcatctcgtgacgacgtcatccttgatgaaatgatacgtttgggcttttgggatgctggtggtgacccacacgctgcggagcttactgaaataatggcgcgatctaaggaaatccgttctgaattgagtcaactcaatagccaaaatgcccgttacttagaccctgaggcagccttaaaggcgatgcatgcggagcgcaaggcagcagctctcgctcgtcggaaggagacaaaactggcccgggcgcgagcgcgccaggcgcgggcagaggcgtgggctcaaagatcccgcgacgcggtctggcatctgggtcctggtgtgtccgctgcacttgaacagggcgagggcaagtccgcgccgcggtcgttagcgccggggcttccagctcttgccacaccagcagcggtagcgagcgctatgggtgttagcactggcgaactccgattcctggcgtacgcccgcccaatgtccagagtctctcattataagcgtttcgaaataactaagaaaagcggtggaaaacgtgtgatatcagccccaatgccgcggcttaagtatgcacaatactggcttctggacgctgtcttatccaagttacctcttcacccggctgcacacggtttcgtgccgggaagatccatacttacaaatgcccggccccatgtaggcagagatgttgtggcgaatatggatctccgggatttcttcccaacgctcgacgatcggcgtgtcaaggggcttttcgagtcgttgggctacggcgaggacgtcgcacaagttctcgctttaatcgcgaccgagcctgtaactgacgaaatagagattgatggccgggttacacacttggcccggtccccaagaagacgcttaccacaaggcgccccatgttcccctgctataaccaacctgatctgtcgcagattagacgctcggctggcaggcctcgcggctaagcttggcttcgcgtacacgcgttacgcggatgatttaacattcagcgcttcgggcgaagacgcaaagaaggttggagctttgctgagagcagcccaagaaatcgttcgtgcagaaggtttcgaacctcacccagacaaaacccgcgtcatgagaagaggtgcacgacaggaagtgacaggtctggtagtcaacgaccgtctgggagcaccacgtgaggccgtcagacgggcacgtgctgcacttcatcgggcggaacgtcaaggtgtggcgggattgaagtttggtagcggtcgcgatgcattggcggggctggtaggcttcgcccaatttgtagcaatgatagatccacggcaaggcgcttctcttgtagcccgtgcacgggctctgcgcagaggcgctgacgaaggggcaacgtccatgttgagtagagcgggactcgcgcgagcgggccttggggctgccgcactgagaaaggctgctgctgcaggggccccaccagaagcaatgcgctggcgcccggcggagcgaccagctccaactctcgaccccgtcttggttgaggctgaacgagctgcggcagccaaagcgcggcgagaggctgagaaggaaggatcacgccaagcgaaatccgcacgaagcggtacgtcagtaccaccagtacgtggcgctggtacaggcgcgagtggtggtggtggacccgctcgtgccgtctggggacgtactgcgaccccggagttgggtgagtcttctgccgagtgggcacgtccggcaaccccacgacgaagtttctggtcgttagcggtgaccggttggcttatactgatggcccttgcggtcttgccatttgccccctggcttacggcgttgttgggctatttagtttatcgacggttacgc

SEQ ID NO: 340 - RNA, 148 nt, synthetic construct
  source 1..148: mol_type = other RNA
taggatactagctcccccgcgtttcgcgggtcaggtaagttgtatgctcgcctgtggctcgaggctgacagatcctctggagtctcttactttgtagacatagtaagagactccatgattactgtcagcaatactgtgtagtatcctt

SEQ ID NO: 341 - RNA, 134 nt, synthetic construct
  source 1..134: mol_type = other RNA
ttctcttagactatacataggtttcctatgttgattcatacatggttataaatatgtaaataaaaggcgcaaaaccggtttcataaatgtctcccggtgttgccatcataatttacaacaattgtaagagaatt

SEQ ID NO: 342 - DNA, 147 bp, synthetic construct
  source 1..147: mol_type = other DNA
acgaacaatcacatgacatctgcaggggacagccgggattaaccgggattgtccgggatcagacggaaaagagccgcagttccaaggggctaggcgggccagcgcgtggcggcggcgcggcattcagtgccatttgattgttcgcag

SEQ ID NO: 343 - DNA, 153 bp, synthetic construct
  source 1..153: mol_type = other DNA
atctttacgcgattaaagccttatggcttagccgggtgtttagccaggctcgtttgattggatcgttttatcccgcagaatgcctctgcggatgtccgatcgcaagctcactcccatccacagaggcattctgcggttggtcttggtaaagat

SEQ ID NO: 344 - DNA, 214 bp, synthetic construct
  source 1..214: mol_type = other DNA
tatcataatgtaaactacattggctctttagcttaggacgaaattcgtctagtcgggtgtttagccagactctaatttattgaacgactttatggttgcgatatgttcgcaaccgtcattcgttcctcatgaaggttgcgaacatatcgcttcctctagtaaagagcaaagcccaagagcattgttcttgggcttttttgtttgtggactaaag

SEQ ID NO: 345 - RNA, 202 nt, synthetic construct
  source 1..202: mol_type = other RNA
taagcagaaacaatagcagaactgaaaggatgaaatccgtttcagcaggggagcgagtcgctgtccggtatggaaaagagaaacatgaaacgggaagatgctgcgaagtactattgcacacatccgtgtgcatcggtcgactttgcgaccctcggtacatcttcgcacttccggtatcgatgtattgtattgtttctgcttt

SEQ ID NO: 346 - RNA, 163 nt, synthetic construct
  source 1..163: mol_type = other RNA
ggggcaatagccataccggatcattttccggcccgtcggcgagtcgccgacggggactgttgacctatccatcagaccgcaatctgctccgatgtactaccacacacttcatgtgttttgggtacatctgcgcatcttacggtatcgcttttggtattgcccc

SEQ ID NO: 347 - RNA, 180 nt, synthetic construct
  source 1..180: mol_type = other RNA
agaagagttcttagccagaccaagctgggttgccattttggtctgagcggtgattcgccgctctagatgaaaactttggtttatcgtattaatgtttaattgcttctacctcagtttgaggtaggcgcattaaacattaacaattatttttgaagtaagaactctacttatttaagaaat

SEQ ID NO: 348 - RNA, 200 nt, synthetic construct
  source 1..200: mol_type = other RNA
acaacaccgttatccttagatgctactactttagtataaacgtgcacaatatctatttatatgaaagtagtgggaagtggttcgctttccgaggtgctatgtcaggactatatttaatgaagtaagcgtctaacttcatatatatgaagttagccacttacttcatcaaaaggattaaaggtaaggaggacggtgttgtc

SEQ ID NO: 349 - RNA, 163 nt, synthetic construct
  source 1..163: mol_type = other RNA
agttctttttagacgcgaagtatattatagtaatgtattagcgagtggatgttgtttcggcatccgagtttaaaactgaactttgtcatcgcaattctaaaggataaaatccagtaggttttatcctttagattcactcaagaattgtggagtaaaaagaact

SEQ ID NO: 350 - RNA, 175 nt, synthetic construct
  source 1..175: mol_type = other RNA
gaaagttctttttagacgcttttttattatgtatgtaataaacaaaaagcgagtgagtgttgttccgacactcgagttttaaacttagatactatcatcgcaaattttaagtgcaaaatccagtaggtttcacacttaaatttcactcaactattgagaagtattaagaactttc

SEQ ID NO: 351 - RNA, 194 nt, synthetic construct
  source 1..194: mol_type = other RNA
tgctgtctccttagattcacggatctttttagtttgtgcacaatatactaaaattgttttgtgtgggggatgattagtcctcttataagaaagtactactcatgaattgttcttttgtaagcaaacggctttacttacaagtaaagacctttactcacaaaacaaaatagttgatagggtaaggagacagcatt

SEQ ID NO: 352 - RNA, 260 nt, synthetic construct
  source 1..260: mol_type = other RNA
aatagaagtaccttggttttcagaaccaggtagggagtccctatctttattaatgttatttaatagctatgaatataagctctgcttatattcataccaagtgctagtcgcacttggtatgataaccttacgaaatatttaggatatttctaaggttatcaaagtgaaatgaaagaagcagatgttgaacactgaataacgagttattcagtgcccaacatctgaacgtgaaaaccaaggtgattttaaaggagattata

SEQ ID NO: 353 - RNA, 250 nt, synthetic construct
  source 1..250: mol_type = other RNA
tggaggagtcgaatccgttagccagcgctccggcgcaagggcggcgtcgcgccgtccgggcacaatcactggccactctccacaaggtaggctgttcttggtctgctcgcccagcaggggtactgcgaacgggctcagctggaccaaccacaccactgcggtttgagcccattcgcagtacccctgctgggcggcagaccggtgagcctaccgtgtcccatgatggtagtagcggcctcgactcctccgc

SEQ ID NO: 354 - RNA, 253 nt, synthetic construct
  source 1..253: mol_type = other RNA
cggaggaatcggaatcgttggcctgtacctcggtaaacgggcggcgatgcgccttccaggcacgatattcgatcaatcaccacaaggtaggctatgcgtggtttggctgcccggagggggtactgtggccggggatgtctgggccaaccacgcagtcgcggttcatccccggccacagtaccccctccgggcgccaaaccggtgagcctaccgtgtcccatgtcggagagtagcgattccgattcctcctcga

SEQ ID NO: 355 - RNA, 230 nt, synthetic construct
  source 1..230: mol_type = other RNA
ggggatgcggcggcgggccggaccttgcgacccgggcggcgtttcgccgtccccgcgatctggcttcccacgcgtcaccggctcgatcttcactgggccgaatttgcctaccatcgcgtggccgcggtgcgggttctgcgaacccagccacgcgatggtaggcaattcggcgtcgagtggaccgatccggtccttggatttgacgaaggcgcccgtccttcgcatcccct

SEQ ID NO: 356 - DNA, 2154 bp, synthetic construct
  source 1..2154: mol_type = other DNA
atgtggtcgcatccacagtttgaaaaagggggtggtagcggaggaggatctggggggagcgcctggagtcatccgcaattcgagaagtccggtgggtcgagcgggggttcaagtggctccgaaacacctggcacgtcagagtctgcgacacctgaatcttccgggggaagtagtggtgggagctctccccttcgtgtagaagacgagacgaaaataaacccggaagtttggtacacgcccgacaccgtaggaaaacttaacgtagagccgtttatggttacaatacgcgaccctgaggtacccgttcggattaagcaatatccgattccgcttgaaggccgtcaggggcttaagcctgagatacagagattaatcaaacaaggactgttggaaccttgtatgtcacctttcaatacaccgattttgcccgtgaagaaggcagatggtggctaccgattagtccatgacttgcgtgaaattaacaaaagaacagtaactagattcccagtcgtagcgaacccgcacactctgctgtcacaattaggaccgaacgaccgctggtattcagtgatcgacttgaaggatgccttctgggcgtgtcctttaaaagaggaatgtcgtaactactttgcattcgagtgggaagacccggacacgcaccgaaagacccaattacggtggacggtcttgccacaagggtttaccgagagcccgaaccttttcggccaagcactggaacaaattttacaggactaccaaatcggagatactttgacactggtgcaatatgtagacgacctgttaatcgcaggtgaggacgaagagcgggttcgtgaggagtctattaaactcctcaattttctttcactgaaaggccttaaagtctctaagagcaagttgcaattcgtagaaaaggaagtgaagtacctcggacatcgattatcacaaggtaccaagaagttagacccggaacgggttaagggcattctctctcttccctcgccgaaaacgaagaagcaagttagacaactgttaggcctgttcgggtattgtaagcagtggatagaggggtacagtgggaaggtcaagtttctctacacgaagattactaagaacggcctgttaaaatggacccaggaagacgatcaacgactcaaggaattaaagactgagcttgttaatgcgcccgttctttcgcttccggatcttaagcgcccattcttcctcttcgtcaacacagaagaggggaccgcattcggcgtgcttgcacaggagtgggccggcaagaagaagcccgtcgcatacatctcaaaacttctggaccctgtttctcggggttggccgacctgtctgcaagttgtcgttgcggcagctctcctggttgaggaagcgcacaaaatcacgtttgggagcgagctgcgtgtgttaagtccgcataacatccgaggcgtgttacaacaaaaggctgagaagtggattacagacgctcgcctggtaaaatatgaggcaatcctcataacatcgccgcaccttacgctggagacgacaagccttcaaaacccggctcaattcttgtacggagaaccatctcaagatctgttccacgattgtttgcggaacatcgaggagcaaaccaagattcgtccggaccttgaggaagaggaacttggtaagggagaaaagctgtttgttgatggatcaagtcgtgtcgtagaggggaaacgcaaatccggctacgcgataatagatggcaagacgtttaaggtgattgagtcaggtcctctgtctccgtcctggagcgcccaggcctgtgagttatatgcagttctgaaggctctccagcttcttaacggcaaggtaggcactatctatacagactcccggtacgcattcggcatcgtgcacacattcggcaagatttgggaagagcgcgggctgatcaacagccgaggaaagagtctcgttcaccaagaacttatttctcaaatcttacaagcaatacgcggcccatccgagatagccgtggtccatgtgaagggacaccaaagaggactgaatccattggttcggggtaacaacctcgccgaccaagaggcaaagcgagcagctctcagcgcactggacctgctcgagcaccaccaccaccaccactga

SEQ ID NO: 357 - DNA, 2160 bp, synthetic construct
  source 1..2160: mol_type = other DNA
atgtggtcgcatccacagtttgaaaaagggggtggtagcggaggaggatctggggggagcgcctggagtcatccgcaattcgagaagtccggtgggtcgagcgggggttcaagtggctccgaaacacctggcacgtcagagtctgcgacacctgaatcttccgggggaagtagtggtgggagctctgccctcacggaagttgatgaacaggaaatcgcggataaggtctgggccgaaaaagggggtgcatctagaatgcagatttcacctatccaggtgcaagttaagcctggtgtgacagggttatgtacaccgcaatatccgatgtcccgcaaaggtcgtgaaggtctgaagcccgttatagaacgactgttagagcagggtatgcttgagccgacaatgtcaccctttaactctccgatactcgccgttgcaaagaaagatggcaagtatcgcctggttcaggacctgagaaatatcaataaagtcatagtcccgcgtttcccaaccgtgccagacccttacacaatcttagggatgataccaacggagcaccgttggtttaccgtgattgatctgaaggatgccttttggtcttgtcccctggacgaagactcacggccgctgttcgcttttgaatggaccgatcccgagacaggcaagaagggtcagctgcggtggaccgtacttccacagggttatactgaaagtcctctgcttttcggtcaggctttatccgaaaaattacaggagtttgacaaagggcccgggattacactggtccaatacgtggatgacctgttactgagcggtaagaagcgtgaggaggtccgtcaaggcagcattcgactccttaattggcttagtaatcaaggtctgaaggtgagcaaagagaagctccagtttgttgaacagaaagtcaagtatctgggccattatttgcagcatggaacaagatcattggacccagagcggattagaggtattatggagctgcaacctcctcggaataaaacagaggtccgtaaggcccttggaatgattggctactgccggctgtggctggatcagtatgcggtccttgcaaaattcctgcatcagaaactggaaggtcccggtgaccaggtggagtgggttgaaaccgacagccaaaagtgggaaactttaaaagaagcattaacatccgcgccggtattggcgctgcccaatagcaaactgccgttccatctgtatgtttcagttgctcaaggagtggccataggtgttcttgctcagaaacgtggcggtaaatatcagccagtagcgtaccttagtaaggaacttgagcctgtggttaaaggttggccggtatgtgttcaggcggtcgccgcagccgcggtgctggtcataggtagcaagaaacttaccttcggcggggcgctcatcgtgcacagcccgcaccaggttaaccccgttttgagtcagctggcaacaacctggatgacggagggtagacttctcaagtacgaaacgatcttaagaacctctccagatgtagtgattgggacggatcgcaacttaaatcccgcagaattcttgtccggagaacgaaaagaatgggagcctgaagaccacgattgcctctcactcgtcgaaatgttgacaaaagttcgggaagatttggaagagacaccgctggaggaaggtgaaaaatggtttattgatggttcatcgcgagtggaagaaggcaaacgcaaaagtggttacgcgatcgttgatggcgtaggtgaagtcatcgaaaaaggagccctcagtccgacatggtcagcccaaaaatgtgaattatatgcactggcgcgcgcgctcgaacttgctgaaggcattcgagccacgatttggactgacagtaagtttgcgtggggcgttgtgcacacctttggcaaaatatggcaggagcgggggtatataaaagcgaatggaaaagaagtggaacatgtacagttagtggaccgcaccctggaagctcttaaactccccgataaggtggccatcgtgcatgtcgcggcccaccagaaaggggatacacctgaaatcgttgggaatcggtgggctgataaatgggcaaaggaggctgcgggagaacttaccttagcgctcgagcaccaccaccaccaccactga

SEQ ID NO: 358 - DNA, 2172 bp, synthetic construct
  source 1..2172: mol_type = other DNA
atgtggtcgcatccacagtttgaaaaagggggtggtagcggaggaggatctggggggagcgcctggagtcatccgcaattcgagaagtccggtgggtcgagcgggggttcaagtggctccgaaacacctggcacgtcagagtctgcgacacctgaatcttccgggggaagtagtggtgggagctctccccttacaatggacgatcagaatcagatcaatcctgatgtttggtactcgcctgatactatatcaaagctggaaatcccaccaattaaaattcagatatctgaaccgcacattccagtccgggtcaaacagtaccccatttcccttgagggtcgtcgtggtttgaaacctgagatagatcgcttgctgacccaaggcattctggaaccgtgtatgtctccgttcaacacccctattctgccggtccgtaagccgaatggtaagtatcgtttagtccatgacctgcgcgaaataaataagcgaacgattacgcggtttccggttgttgcgaacccttatacgttattatccaaactgggtccccacaactcgtggtattctgttgccgatctgaaagatgccttctgggcctgtccactcgccgaagaatgccgcgactacttcgcttttgagtgggaagatatagaaacgggtcgccgtcagcagttgcgttggactgtcctgccacagggcttcaccgaatcaccgaacttatttggacaggcattagaagaattactgaaagaatatcaggtacagacaggaaatgtgttattgcagtatgtggatgatctgctgattgcagggaacaataaagaagatgtgcgcaaagaatcgatccgcttacttaatttcttagcccagaaaggcctgcgcgtttctcaggaaaagttacagttcgtggaagaaaaagtaaagtacttaggtcattacctgtttaatggaaaaaaaattctggatccggagcggataaagggaattctggagctgcccatgccggtaactaaacgccaaatccggcaggccctcggtctttttggttactgtcgtcaatggatcgaaaactatagttttaaagtcaagtttttgtacgaacagttgtcgaaagacaaaattttaaagtggacacctcgcgatcaggaacagtttgccaatttgaagcgtgaattaagtcaagcaccggtgctgtccttgcccgacttaaaacggccttttcatctgtttgtcaatatacatgaaggtaccgcgtttggcgttctgacccaggagtgggcagggcagaagaaacccgtagcttacctctccaaactcctggatccggtgtcacgtggctggccatcatgcctgcagatcattgttgcagcagcacttctgctcgaagagactaatcggatcacgttcaatggagaagttgtgctgtatgctccacacaatattcgaggggttttacaacagaaggcagaaaaatggctgaccgataatagattattaaagtatgagggcattctcattgagagtccgaaattttcattaaaaacaattggtgccgtgaacccagccgagtttctctatcccggcgaaggcaatgaattactgcacaactgttttcagaccatagaacagcaaacacgtattcggccagatctggaagaagaagaactgcagtgcggtgaagttctgttcattgatggcagcagccgtattgttgaagggaagcgtctgtccggttatgcgattgttaagctggagaaaggcgaattcaagacaatagaatcaggtcctctgtctgctagctggtccgcgcaagcttgtgagctttatgccttatggaaagctttggtttccctgaaaggtaaagatgggaccatctacaccgatagccgctataccttcggcgtagtgcatacctttggaaaaatctgggaagaacgaggtttcatcaatagtcaaggaaaagaattgatccacccagaattgatacggagagtccttggggcactgaaagtcccaaacaagattgccgtcgtccacataaaaggacatcagcgcggcacgaactatcaggtccgcggcaataatgcggcagatatcgaagccaaaagagttgcgggtaattataacaccattctgactattcagctcgagcaccaccaccaccaccactga

SEQ ID NO: 359 - DNA, 2157 bp, synthetic construct
  source 1..2157: mol_type = other DNA
atgtggtcgcatccacagtttgaaaaagggggtggtagcggaggaggatctggggggagcgcctggagtcatccgcaattcgagaagtccggtgggtcgagcgggggttcaagtggctccgaaacacctggcacgtcagagtctgcgacacctgaatcttccgggggaagtagtggtgggagctctccgttaagagttgaagatgaaaaagaagtgaaccctgaggtatggtataccccggagacgattggtaaactgcagataccgccgtttagtgttacgataataaaccccgaagtgccgatcagaatcaaacagtatcctattccgccggaaggcaaatggggtctgaaacctgaaattgaacgtttactggaaaaagggcttctcgagccttgtatgagcccgtttaatacgccaatactgccggtcaagaagtcggatggtagttatcgtctggtccatgaccttcgcgaaataaacaaacgtactgttactcggttccccatcgttgctaatccgtatactctgttaagtcgtatagggcccgaaaatcactggtattctgtgattgatcttaaagatgcattttgggcctgcccactgagcgaggaatcgcgtaattacttcgcatttgagtgggaagacccagaaacacaccgcagacagcagcttcggtggacggtgctgccgcaaggcttcaccgaatcccccaacctgtttggtcaggcgttggaaaagatactgcaggaatatgtcgttaatgagaacacaatactgattcagtatgtggatgatctgcttatcgcaggcaaggaggaggcgattgtccggcaggaatccattaagctgctcaactttcttgcccttaaaggactgaaagtatctcgctcgaaattgcaattcgttgaagaagaagttaaatacttaggccattatttaagcaagggtgaaaaacgcatagatcctgagcgggtgaagggtattttgtcaattcctccaccaacaaacaaaaaacagatccgtcagttattgggattagtcggttattgcagacaatggatcgagaactattctagcaaggtaaaattcttatacaataagctttctcaggataatttgttaaaatggactatggaagatgaacagcatctcgagcagttgcgtaaagatctgattacagcacctgtcttatctctgcccgatttaaaacggccttttagtttgttcgtaaacaccgacgaaggtaccgcgtatggcgttcttacccaagattgggccggcaaaaaaaaaccagttggctatctgtcgaaactcctggatcctgtatcgaaggggtggcccacatgcctgcaggccgtcgttgccgcagcactgctggttgaagaagccaacaaaattaccttcaacggtgagctgcgggtcctgagccctcataatatacgtggcattctccagcagaaagcagaaaaatgggtaacagattcgcgcttactgaaatacgaaggtatcttaattgatagcccaaaactttccctggaggtcaccacactgcagaatcctgcacagttcttgtacggcgagccttgggacagccagctgatccatgattgttttataacgatagaaagtcagacaaagatccgccccgacctggaggaggaagaactgggtgagggggaaaagctgttcgtggatggctccagcagagttgtgaacggtaaacgaaagtcaggttatgcgattattaaggggccgaatctgaaggttctggaaagcggccctctgaatcattcttggtcagcccaggcctgcgaattatatgcagttctgcgcgcattagaatatctgcgcaataaggtcgggacgatctttactgatagtaaatatgcgtatggagtagttcatacgtttgggaaaatctgggaagaacgtggcctgattaatagccagggcaaggacattacccaccaggaattgatagttcaaatcctgaaagctctgagaagcccaaaaggaatcgcggtggttcatctgaaaggtcaccagaaaggcgtggatattcgtaaccgcggtaacaacgtagcagatcgagaagcaaaacgagctgccttgaaggattggacccctctcgagcaccaccaccaccaccactga

SEQ ID NO: 360 - DNA, 2181 bp, synthetic construct
  source 1..2181: mol_type = other DNA
atgtggtcgcatccacagtttgaaaaagggggtggtagcggaggaggatctggggggagcgcctggagtcatccgcaattcgagaagtccggtgggtcgagcgggggttcaagtggctccgaaacacctggcacgtcagagtctgcgacacctgaatcttccgggggaagtagtggtgggagctctgttctgcgtgaggaagacgagaagaagataaatcctatagtctgggcaaagcctgggaacccggggctcatgaacgttacgccggccaagatacatctcaagactgacacccctgtatatcggcctcaatacccaatcagaccggaagctgaagaggggctcaagcctgtggtgagagagctgctggatgacggcttgatagaacctagtgacagcccgtactgcactcctattttgcctgtaaagaaacctaatggaacctggcgcatggtccaagatctgcgtgaagtgaataaagtggtcatcccacgtgcgcctatcgttcccgacccccatacaatactgcgtagaatcccggacactcacgtatggtacacagtaatagaccttaagtcagcattcttctccgtacccgttgatcctgagagccgccctatctttgccttccaatggccgcacccggagacaggaaagctgaccagattccaatggaagatcctttgtcaaggttattgcgaaagcccaaccatcttcggtgagatattggaagagttgcttcaaggatggtcaccacccgagggcacattgctcacccagtacgttgatgatctgcttatatcaggtgaggaaggtaagcaagtgagaaaggcctcaatatccctcttaaattttctgggtgaaaagggcttgcgcgtctcacttgacaagttacaattttgcgagccagaagtaaagtatctgggcttaattctcaagaagggtacaaagtgtattaaccctaagcggcttgaggggatacaaaacttggagatgccgaaaactaaacgtcagctgcggtcatttattggaacgataaacttttgccgacaatggattgagggattttccgaattaatacaacctttcctgaagaagctgttaaaagaggagccggagacactcgtgttagaaaaggcagactacaagttgttcgaacgcgtcaagaaggttctggtatcagccccggcattagggttgccgaaccctaacaagccgacgcacttgtttgtcaccacgggcaacggggtcgcaaagggtgtcttagcgcaaaagaaagcaggtcaataccagcctatcggttatttatccaagcatctggacgctgtggtacttggttggcccacatgtttgcaagcgtgcgctgcagctgccgaattagtgaaactgacgagaaagttataccccttcgaggctatcgtactgcatagtagccatcagttaaagacaattttaacgcacactgcaagacggtggatgaccgactcccgcttactccaaatcgaagctattttacttgagaaaccggacctgctgttaaccacaacggatcattacggtccagcaggtggtttatccgaggccgtccgtaaagagatgtgcaatgaacatgactgtatagccattacggatcttcagactaagtttcgggaagacttgcaagaggagccgatagagggcgcctggaacttatacacagacggcagtagccgtgtagtcaacggcaagcgaatcaccgggtacgcgatagtggaagacggtggtttagaggtggagacgggtcccttaccgccgagtatgtcagcacagactgctgaattgtatgctttaaaacgtgctctggagataggtaaggaaaagaatgttaacatatggacggacagtaagtacgcctgcggtgttgtgcatgttttcgggaagatatggtctgagagaggtttgttaacatcgcagggtaagaacttagcccaccatcgtctggttttagacacgttggaagcactgtcatttccaagtcgggtagctataatccacatacccggccaccaaaagggaaacgctcccgagatcgtcggaaaccgtttggctgacgaattagcgagacgggccgccgagcgagaatttgacactgcacgacttgctgctttaatcctcgagcaccaccaccaccaccactga

SEQ ID NO: 361 - DNA, 2148 bp, synthetic construct
  source 1..2148: mol_type = other DNA
atgtggtcgcatccacagtttgaaaaagggggtggtagcggaggaggatctggggggagcgcctggagtcatccgcaattcgagaagtccggtgggtcgagcgggggttcaagtggctccgaaacacctggcacgtcagagtctgcgacacctgaatcttccgggggaagtagtggtgggagctctgagggggcagatgagatattgaataaaataccggagggggtttggagtactggtccctacgatgttggattctgtaaaaaatacaaacccattgaattaacggtaagcgacacgcaagtggtataccggaaacaatatcaatggccagcagaggcagacagtggcatggaggagacgcttagaggtctgtggcaagcaggggtgttggaagagtctcattcgctgtggagcacgccacttcgcccagttaaaaaagccgatggggtttcatatcgtatggctcatgacctgcgtgcaataaatgatgcgatcatgacacctgtgctcccggttcctgatcctcatcgcatcctgaccagtctttcaccgaatctgaagtggtttacggtaattgatctggccaatgcgttcttttgccttccgctgcatccgaacacgcgtaaatacttttcttttacgtacaaacacacacgtctgcagtacaatcgtctgccacaaggatgtaaaaatagtcctggtttattcaatcaggctctcaaggacatgttaagtgatctccaacttccgaataattgcgtcttggtccagtatgttgatgacctcctgctggcatgcgagacaccggaggtttgcctggaagcgaccaaacgcctgttattgaagttgcactcctgcggctttaaagtctcccggaagaaactccagtgctgtcgcaaagctgtaaatttcctgggtcgtgtcgtaagtgcacacggcagcacgatgtcaactgctcatcgaaatgccatccttcaccatcccaagccggaaactgtcaaagacatgctgagctttcttggcttatgtggttactcccgtaattatattagctgttttgttgagagaatagctcccctgcgggccctgattcgggagaaaggcaacaaaaacactacagctcaactgaattggactgaggaagcgacgaactgtttcataagcctggttggggcacttgcgtcggctgcagcgctcgctgtccccaattatgatctcccgttccacctgaacgttagcctctccgcgtccgttgtgaacggtgtactttttcagaaacgagatgggggtcgttgtgtcatgatgtactgttcgacgactctcgatcccatggagcagaaacaaccgcaatgtacgagatacgccgccggattagccacattgatcacgaaaaccgcacacattgttaaaggctacccgctgaatatacttaccgaacatagtgttagcgcatacgttgcgagtgcctcatttacaatgtcctccttgcggcagacaagacttatgaaaattctgcaggctcccaatattcagtacgtacatactggcatcaatatggcggattgtattggcgcaacagggaccccacatacttgcgtgttccaagtgcaacaagatcttaaactcagacctgacttgcagacctccccattgggaagaggccatctcgcctttacggacggatgttgctatcggcagaccgatgggtcacttcgcgctgccgcagcggtagtgcgttacgattcaggatcggacgtttttactaccgtggcgactgtgcagctgccggatagcccgtctgcccaagcagcagaagtgttggctctgtgtctggcactggaagcttacgtagatcaagaggttacggtgtattcagatagtgcatatgccgtaagcgcagctgtcttagatctggctgcttggaagcgaactggcttcgtgactgctaaaggggttcctatagcccatcgcagcttaatggaacggctggctgtgtccattatgttacctcgtgccgttgcaattgtgaaaaccgcgggccatagcaaagcaaacacgatgactgcgcgtgggaatgacgcagccgacagagccgcaaagaaagcagccggatatcagctcgagcaccaccaccaccaccactga

SEQ ID NO: 362 - DNA, 2208 bp, synthetic construct
  source 1..2208: mol_type = other DNA
atgtggtcgcatccacagtttgaaaaagggggtggtagcggaggaggatctggggggagcgcctggagtcatccgcaattcgagaagtccggtgggtcgagcgggggttcaagtggctccgaaacacctggcacgtcagagtctgcgacacctgaatcttccgggggaagtagtggtgggagctctacggtttccctgcaagacgaacacagacttttcgatatccctgttacaaccagcctgccggacgtctggttgcaagatttcccacaagcctgggctgagactggcggcctgggccgcgctaaatgtcaggcgcctatcataatcgatctcaagccgacggcagttcctgtaagtataaaacaatatccgatgagcttggaagcacacatggggattcgccagcacatcattaagttcctggaattaggggtgcttcggccatgtcggagcccttggaacacccctctgttacctgttaagaagccgggtacccaagactatcgaccggtacaggacttgagagagatcaataaacgtactgtggacatccacccaacagttccgaacccgtacaacttattatctacacttaaaccagactacagctggtacactgtgctggacttgaaagatgccttcttctgccttcctcttgcgccgcagagtcaagaactgttcgcgttcgagtggaaggaccccgaacgtggcattagcggacaacttacctggacacggctcccgcaaggctttaagaattcgcccactctgttcgatgaggcacttcatcgggacctgaccgacttccgaacacaacacccagaggtaaccctgctgcaatatgtagacgatcttttattggcggctcccacgaagaaggcatgtactcaagggacgcggcatttgttacaggagctcggggagaagggttatcgggcaagtgcgaagaaagcacagatatgccaaactaaggtcacctacttgggctacattctttcggaaggcaagcgctggttaactccaggccgcattgagacagtagcacgaatcccaccacctcgtaatccccgcgaggtacgggagttcttagggactgccggtttctgccgattatggataccgggtttcgccgagttggcggctcctctctacgccctgactaaggaatccacgccattcacttggcaaacagagcaccaattggctttcgaagcgcttaagaaagcgttgttgtcggcgcccgctctcgggctgccggataccagcaaacctttcaccctgttcctcgatgagcgtcaaggtatcgcgaagggagtgttgactcaaaagttaggtccatggaagcgcccagtagcgtacttgagtaagaagctcgaccctgtagcagctggctggccaccctgcttaagaatcatggcggctacggcgatgttagtgaaggactcggccaagctgaccctgggtcagccgttaacagtcattacgccgcacaccctggaagcaattgtaagacagccgccggacagatggatcacaaatgctcgtcttacgcactaccaggcgcttcttttggatacggaccgcgtccaatttgggccaccagttacccttaatccagcaaccttactccctgtccctgagaaccaaccttcccctcacgactgccggcaagtgttggcggagactcacggtaccagagaggacctcaaggaccaagaattgcctgacgcagatcatacttggtacacagacggctcttcttacctggatagcggaacgcgcagagccggtgcggctgtagtggacggacacaacacaatatgggcccaaagtcttccgccgggaacctctgcgcagaaagccgagctgattgcactcactaaggcgctggaattaagcaagggtaagaaggcaaacatatacactgacagcagatatgcattcgccacggcccacacccacggtagtatatacgagagacgagggcttttgacctcagagggtaaggaaatcaagaacaaggcggaaatcattgcgcttttaaaggctcttttcttgccccaagaggtggcgattatacactgtccaggacaccagaaagggcaggaccccgttgctgtgggcaatcgccaagcagaccgtgtcgcccggcaggctgcgatggcagaggttttaaccctcgagcaccaccaccaccaccactga

SEQ ID NO: 363 - DNA, 1992 bp, synthetic construct
  source 1..1992: mol_type = other DNA
atggctagcgcatggagtcatcctcaattcgaaaaatccggaacgccggaagaaaaagagacattacttgcggacgtacccgcctcggtgtgggcaaaagatagttatgacattggaacgctcacgacggctccgccgctgataattaaggcgaaacctctgtcaagatatcctgcaaaggctcaatatccgttatccaaagaagcggaagaaggaatcgaacctactttcaacgcgttgcttgagcgcggcgctatcgtcccttgcccatactccccgtgtaacactcccattcttccgattaaaaaaccggataatacttggcgctttgtacaggatcttcgtttagtcaatgaagcagtagaaccaagacatcccatagttccaaatccgtgtaccatcctttctactattccatcaaatgctaagtgtttcacggtgattgacatcaaaaatgcatacttcagcattcgcgtcgacccggccagccagttttggttcgcctttacatacaaggggcagcggtttcagtgggcgcgtttagcgcagggatatgtggaatccccatcatacttttgtgaatgcttaacggaatgtttatcgaagtttaccccgcctgggggctccacgatcattagttacgtagatgacattcttctctcatctccgtcgaagaaagtttgtaagatggacacagtcgcgttgcttacctatctggccattgtcggcctgaaagtgagtaaacagaagctgcagctgtgccaagaaagagttaagtatctgggccatatattgaccccaggttctcgggccttagatgcatcccgtatctcagcgatcaccgcttgtccccgtcctaaaactaaacaacaattgttaagatttctgggtatgaccggatattgccgcgcgtggatactccactatgcagagcgtgcacagccattacagagttgtgcaaatgcatgtaaaaatctgacggataatctgacctggacagatgattgcgataaagcgtttgtcgatcttaaagtcgccctggctagtacacctgctctgggtttgcccaactatgatcttccattccatctgtttgtttgcgaaaaagctggttttatgtcaggggtcctgtgtcaacagcatggtgggcaatatcgcccggttgcttatctgtctaaacatctggaccctgttgctcgaggtatgattccgtgcctgaaagcggttgctgcggctgcctctggcgttctcagctgtgcagatcttgtactgctgcacccgctgaccgtgcatgtgccacacgaagtgcattctttactgatgcaggccaaaacttcccatctcacccctgcacgcttactgtcctatcaacatgttctgctgacattgagccatgtgaccctggcccgttgcacgagtctcaacccggcgacattgctcccaacacccgatgatggtgacactcatgattgttgcgaagtggttagtatttgtacaaaacctcgacccgatatcagcgagataccgctgaccaaccctgacttggtattctttgtggatggtagcagtatgcggttaggttcgggagaggttgggtctagctacgccgtggttaaccactttgaagtagtcgaagcttattcgattcccggcacttatagcgctcaggccgccgagttagtggcgttgctgcgtgcttgcatccttgcgaaaggcaaaagtgtatgcatctacaccgatagccgatactgctggggtattgttcacgaccatggggccatttggaaagagcgtggtttcctgacagccgcgggaaaaccgatacaacataaagacctcattgcatctttgcttgaggcaatccagtttccagcctcagtggcagttattaagtgtactgcgcactcaaatcacaaagatgaggtatcatctggcaataaccgcgccgatgccgcagcaaaggccgcagcaaaaggcggccagcggatataa

SEQ ID NO: 364 - DNA, 2001 bp, synthetic construct
  source 1..2001: mol_type = other DNA
atggctagcgcatggagtcatcctcaattcgaaaaatccggaaatcatgttcgcgcggacgagatgctcgctacaattcccgaatccttatggacctctcatcctcacgacgttggtcgcatcgaaggcgaagtcgttctcacccttaaaccaacggttaccaaacccatctggcgggcgcaatataaactcaaaccggaacaagtggaaggcattgcagaaacggtaacaggtttacttcgtgccggtgtgttacgcgaggcggaaggagcgcgttggaataccccaattctgccggtgccaaaagccggaaacaagggttggcgtatggtgcacgacctgcggctcatcaacgaagcaactactactctggcgctgccagtcccggatccctatgtggccttacgagcaattactcctgaacaaaagttctttagcgtctgcgaccttggtaacgctttcttttgtttacctttggccgaagaatgccaggagtggtttagttttacgtatggcaacaagcagtacacctatacaagattagcgcaagggtataaagattcaccgggtctgttcaatcaggctctgaaccaaatcctcgaaaatatgatactcccagagggggcgaccatcatacagtatgtcgacgacctgctggttgctactaagaccgcagaggattcactggcggcgactaaaactttactgatgacgttagcggatgcaggttttaaagttaaaagagagaaatgccagattactcgtagatcagtagaatttttagggcgtattgtaggtgagcatgggaccgcaatgagcgatatgcatcaggatgctatactgcagtatggtaaaccgaaaacggtacaagatatgttaggtttcttaggactgtgtggatattcacgcacttacgttcctgaatatgttacgttgacccagcctttgcgtgaaatggttacagaagtgggccatcgtgctctgaaagacgaccttaattggaccgtagatcgggataaagcttttcagaaagtgaaaagtgcactgtctgctgcggcccatctggcatccccgaattatgaaaaggatttttaccttgatgtcgccgaaacagagggcatagtgaacgctgttctgtatcaacgggaacgaggggagcgaaagattctttcatactttagttgtaaacttgatagcgtagaggtgggaaaaccgccctgcataagatttctggccgcattggcgaaggcaatcgagaaaactgcacacatcgtgctgtgtcacccactgattgttaacacggatcactcggtcaccgctttgctggcgagcagtgccttctctttttccgctacacgccagatcaagattgatgatacattgaaaggcccgcacataatgtttaaagcacctaaagataatcatgccaacatggccaaaggagttaatggcgggggcttgcttcagcatgattgtattcgccgcgtcgagggtgacagcaagctgcgcgagaatctgcatgcgacgccgttagacgaccccgattgggaattgttcacagatggctgttcgtacaagagcgacattggtaatcgggcgggttacgcggtggttaagtgggataatgataaagccgatattatccaggctggcgaaatacctcagccggcgtccgcccaggttgcagaaattaaagcactgaccgaagcgcttaaactctctgctgggcataaagtcaatatctacacagatagtgcttatggctttggtgcagtgcattatgaaggaccggcctgggtgcgtcgtaagttcctgaccgccgctggtacgcctgtaaaacatgaacaccatcttcgcgaactgattgaggccttgaacggaccaacagaggtagcagttattaaagtaacaggccactcgaaaaaaaatgataaggaatctaatgggaacgcagcagccgacgcagccgctaaacttgcctgcaattatccggtcaaataa

SEQ ID NO: 365 - DNA, 1995 bp, synthetic construct
  source 1..1995: mol_type = other DNA
atggctagcgcatggagtcatcctcaattcgaaaaatccggaaaccatccagactctgatgatattatcaatgctatgccggcctcactctggtccaccggtcctgctgatgttggaaaactgcagattccgccaatcaaaattaacctgaagccagatacagtccctatttggaaatatcagtaccctttaagccgggagaaaattgatggaatacgccctgtgatcgaagatctgttgcgctccggagttttgcgccaaacggtgagtgattggaatacgccgatactgcctaccccaaaacctggcaagaatgtgtatagaatggtccatgatctgcgtccgattaaccaggtagttttaccgtcacattgtaaaacccctaacccatttgtgatgttaacatcgatcaccccagaccacaagttttttaccgtgatcgatctggcaaacgcatttttttctgtgccgctgcatgaggattgccagaatatattcgcctttacatacgagaattctcagttttcctatactgttctcccgcaagggttaaagaattcgcctagcctgttcaacaacatactgaaaacccacctgagcgaattaaccccgcatctgccgccaaataccgtgattctgcagtatgttgatgatattcttatcgcagctccctcaacagctaaaaaccttcaggccacaagtttggtcctgcactttttagcgacaaaaggttacaaggtgtcaaaagacaaactccagatttgccgcccgactgtacattatcttggccgtttgataacatctggagccacgtcaatgagtcccgaacataaaagttcaattcttaaccacccgaaacctaatactggcaaaagtctgctgtcctttctgggtttaacgggttattccaaacaattcgttccaaattatcaagaccttgtttctccgttacgtgccttaattcgtcagaaaggttatgcaaatctgaatgctcccctgcactggacgcccgaggcagaaatttgcttcaccgcgttgaaacaagctctggctcaggcaactcagctcaacccgccggattattctttaccttttcaccttgacgtctcggagcaggaagggacggtcaaagcggtactctaccagaagcaaggtggtactcgaacggttctcatgtattacagtagcaaactggacaatgtggaaattggccacccgccctgtactcgccattgcgctgcaatcgcgaaagcgttgattaagacagcccatatagtaatgcaacatacagttcatgtccatacaaaccatggcgttgccgcattcttagacagcaccgcgttcaccttatcgacgaaacggcaacagaaactgaagaacatccttgaccagcccaatgttctgtacacgagcgaaggggtgaatatggcagcggagattagtactcagggcgagcctcatgattgtgccgtgctggccgaaaccgatatgaagatcgtagaaactcttaccccaaatccgattgaaaatccagatctggtccttttttgtgatggcagctcccgtcggagattagacggtacattgtctgcagcttatgccgttgtaaaacttgtacccaaaagtcagttggtgaccatagaggccactcatattggaaataattcagcgcaaaaagcggaaataatggggctgactgcagcattaaaccacgctcacggcaaaaccgttaatatctacacggacagcgcgtatgctcatcacgcggtatatgtcgatcttccacattggtcgagaaaaggatttgttaccgctactgggacgcccattaaacacctgccggaaatcattgcactccaggaagcgctgagccgtccgaagggtgtggccgtattgaagtgtaaaggccatcaatcagataacacaatcgtcgccaaaggtaatgcagccgcagacgaatctgcgcgccgattgacagaagatgataagatctaa

SEQ ID NO: 366 - DNA, 1995 bp, synthetic construct
  source 1..1995: mol_type = other DNA
atggctagcgcatggagtcatcctcaattcgaaaaatccggaaccccgtctattccaaatcttcatggtgtgccaagtagtctgtgggcaacacataaagaagacgcaggactggtcgcttgtgcgccgtatgaggccagcattaagcataccgaccccatatacaaaaaacagtatccactcacggaagaaaaagccttaggtattgataaagtactgcatcagttactgctgcagggtgttgtagtgccctgcaaaagtccatacaacactcctatcaatccagtcaagaagcctgacgggacttggcgtctgacccaggatctgcgggcaattaacgacataattatccccgtttcaccgattgtgccggatgttccgaatatcatggcatccatcccatccagccacacacatttctctgtggtggatctgtgctccgcttttttctcaattcctgttgaaccgcagacccagccgctgtttgcctttacgcatcgcggacgtcagtatacatggactcgcttgccgcagggctttgtagatagccctgccgtatttgcactgaccgttcggcaatgtttaacggatgtatgcctgccgccaaatagttgttttctgcaatacgcagacgatattctcgtgactggccaggatgaagcaacgtgccaccaagcaacaattgccgtcttacaacgtcttgccgagacaggctttaaagtttccccctcgaagctgcagctgtgcaagacgtcggtcacatatcttggttatctcatctcgcaaggtagcaaagccttgacgccgagtcgcgtttcaattatcctcgaagggaaaaaacccgctaccaaacaggcgatgatggcattcttgggactgatcaattattgtcggcagtggatacccgactgctcgtattacgataagtgcttgcgatcagcgtttacccacagcgatcctatgtcttcattaatcacatggaccgaggagatgacccaggcgtatggagcgttgaaaaaagcattgtgctcagcccctgcgctgggcttaccgaactatgacttgccgtttcatctgtatgtcacgcatcatgccgatacagcatcagccgttttagctcaggagcatggtgggagtttcagaccttgcgcttttttgtccaaaacattagacactgttgcgcaaggtttgcctacgtgcctgaaagctatggcggctgcagcactgatggtgctggacgccgagaaattagtgctcggccatccgttggtgctgcactgtgaacatcaaatacaatacatgttaaagcacctttcgacccagcatcttagcgtccaacggcgctgtggatatgaacagactttacttgcaaccgagaaccttaccataaagcccacttctagtatggataccgttgcccacgccctgcagcgctttctgcaagtccctgcggatcatttctcagaagatcacaattgtgtcgatagcgtggtatccgattgttctttacgtccagatttgaagtctacgccgttacagaacgtacgaaatctttacgtggatggatcttgtagcaaacctcaggatggcgtttatcttacaggctatgctgtttgtgaactccctgacacagtgctggaagccgcggccattccattctcaagcgcacaggctgcggaactgattgctctcactagagcgtgtgttctcgctgccgaccaggacgtcaatatctacaccgatagtagatatgcgtttggtgtagctcatgattttggtgcgatttgggcatcgcgtggcttcgttgccgcggacggcaaaccgatctcccactcaagccttgtgatggatcttattaaagctgcgcgcctgccacgttctttagctatcataaaaacgcgtgggcactctactttcgatacagaggaagcaaaaggtaataactttgctgatactcaggcgaaactggccgcacaaagtgggaaacaaccgtaa

SEQ ID NO: 367 - DNA, 2025 bp, synthetic construct
  source 1..2025: mol_type = other DNA
atggctagcgcatggagtcatcctcaattcgaaaaatccggatctacacagatggagagtgattcgaaacgcgaggaaatgttacaaaaggttcctgagtgtttatggtcgcaacactcaaccgatattggactggttaaaagtgcgcagcctgtcaaagtggaattacgtccgggaacttcaccgccctggaaaaaccagtatcccctcaaagaggaagcgatccggggtattgagccacagattgaaggtctgctgaaagcagacgtactgaagattacacaaaatcctcagagtaatacgccattgctgccgctgaaaaaaccggacggctcgtatagactggtccatgatctgagagctgttaacgaggtggtggccgattttcctgctgaagttcctgatccgcataccttgctggcacaaataccgcccgatgcaacacacttcactgtcttagatctttgcggggcgtttttttccgtcccgttgtctatagaatctcagggcttttttggtttcacgtacaacgggcagttctacgaatccaaaagactgccgcaagggtttaaacattctccacacatctttaataaggttttacgggaagatctggccggaatcgaccagattctcaaaagcaccgtcgtgcagtacgttgatgatattatcatttgcagccctgacgaagagacgtgtcataaagactcgattaaactgttacagattcttgcggaaaaaggccacaaagccagccagaaaaagcttcaatattgccgcgagaaagtgatctatcttggtcaaacaattaccaagggtcatcggagcatatccgattctcatcttgaagccattcgtaaagcccctaaaccacgaacagtacgcgagatgctgacgtttttaggaattgcgggttacagctcatcatgggtggaagactatgcatctttaaccggtcctttacgcgcaatgattaaagatacgggcaatgcccagttgcattgcaatcttagttggacacaggacggattacttgctttcgaaactatcaaacagcgtttgcaggaagccccggcattggccttgccagactatagcaagaactttttgctttatgtatccactagcaccggcgggcgctatgcgtgtgctgttttgtgtcaaccgaccgggactgggaccactcctcagcccatcagttactactcaacagctttcagcgaagtagaactgggcttaccgctgtgttatcgcgcactcgtcggcgtaagcctgatgtatgataaagcgagttctgtgacgatggggtatccggtaacgattcttacacaccactcagttcgtaatcttttaaactatggcaagtatactctcactatgagtcgtctccgtgattatcatcgactgctcgaacaagaggatgtaacgttggtacgatgtgttacggtcaatccggcggagagtctgccaacatccgaagatggtgagccacatgattgtatccaagaatctgagaaatactcaaaactgcggtctgatctgcaggccctgcccctgtcagaagcagacgtggagtattggactgacggttcctgctatcgcgttggagataagctgtcagcgggctacgccgtcgtcaaagcccaaggtaccgaatttgtagttgaaaaagcgggtatagttccacagcccgctagcgctcaattagctgaactggtgggtttaacagaagcgtgcctgctggcagagggtaaacgtgtgaccatctacacagattcggcatatgcgcataatgtttgccatctctttggcgccgtgtggaagaaccgtggcttcaaaaaaaccgacggaagtccaatacagcatcacgcccagataatgaagttactgcacgcaatgatgaaaccgaaggaaatcgctattgcgaagtgtgctgcacataagatggacgtgtccaaagttacccagggtaataaggctgcagatgaagcagcaaaagctgtgaccggcgccgataaactttaa

SEQ ID NO: 368 - DNA, 1998 bp, synthetic construct
  source 1..1998: mol_type = other DNA
atggctagcgcatggagtcatcctcaattcgaaaaatccggatcattaacgcccttcgagcgtgaggctttacttgcttcagtacctgaatcggcctgggctaaggactcctatgactttggtacgctcactacggcaccgccacttgtgatccatgcgaaacccggaagtcatttcccggcaaaagcccagtacccattgtctaaagaagcggaaaaaggaattgaagcaacttttaaagcgttactggaacgcggagcaatagttccgtgtccttccagtccgtgtaatacgccaatcctgccgattaaaaaacctgataatacctggcgttttgtacaggatcttcggctggtcaacgaggcggttcaacctcgtcacccaatcgtacccaatccgtgcacaattctttcatcgctgccgccagacgtaaagtgtttcacagttatcgacgtaaaaaacgcgtatttcagcattcgcgtggatccgagttgccagttttggttcgcctttacgtttaaaggtcagcgctttacgtgggttcgactgcctcaggggtatgtagagtcaccgtcgtacttcaatgagtcgttggtcttttgtttaagtaagttcacgccgcctggtggttctaccatcatttcatatgtcgatgatattctggtggcttctccatcaaaagagatgtgcaagatggacactgttgcgttacttacttatctcgcaatcgtaggactgaaagtcagcaaacaaaagctgcaactgtgccaggaacgggttaagtacctcggacacatactcacccccgggtgtcgcgctttagatgctagtcgcatatcagccattactgcctgcccaagaccgcgtacgaaacaacagctgttacgctttctcggcatgacaggctattgtagagcatggatactcgattatgcggaacgtgctcagccgttgcagacctgcgctaacgcgtgcaaacacctgacagaccatattacgtggaccgacgattgtgataaggcgttcgtggatttgaaactggcgttagcatccgcacctgccttagggatgcctaactacgaccttcccttccatctgtttgtatgtgaaaaagccggctatatgagcggagtcctgtgtcagcagcatggcgggcaatatcggcctgtcgcatacctttccaaacagttggatcccgttgcacgaggcatgattccatgcatgaaagcagtcgcagccgccgcatctggcgtgttatcctgtgccgacattgtgctgctgcatccggtgaccgtccatgtgccgcatgaagttcatagcctgcttctgcaagccaaaacaagtcacctgacaccagcgagactgctcagctaccagcacgttctgcttacattgagccatgttactctggcccgctgtactaccttaaacccagctaccttactgccgactgccaatgatggggatacccatgattgctgtgaagtcgttaccatgtgtaccaaaccccgtccagatatatctgaaacgcccttttctaatccggatctgattttttttgttgatggttcctcaatgcgactgggctctggtgaagtgggaagtggctatgcagtagttaaccaatttgaggtggtggaaagctattcgttgccgggcacattttctgcgcaagcggcggagttgatcgcactttttcgtgcttgcatcctggctcagggtaaaagcgcgtgcatctacacagattcccgctattgttgggggatagttcacgatcatggcgccatctggcgggagcgtggtttcttaacagccaccggtaaacctattcagcataaagacctcatagcatctttacttgaagctattaagtttcctactagcttggcggttattaagtgcgctgcgcacaacaataccagtgatgaagtgtcactgggtaataatagagtggacgccgcagccaaggcagctgccaaaggtggtgtgcgtatttaa

SEQ ID NO: 369 - DNA, 1998 bp, synthetic construct
  source 1..1998: mol_type = other DNA
atggctagcgcatggagtcatcctcaattcgaaaaatccggacccttgtctgaggagcataatgtcttactggcctgcattccgcacgatctgtggtcgcagcataagaccgatgtgggcttagtcagatctgcgcaaccggtacacattaaagttaaaactggcatcatgctgccatataagcgtcagtatccgctcaaaccccatcaaactgagggaattggtccaacgattaaaggtctggtggcagcgggggttctgaaaacaaccaagagtccctgtaatacgccgatcttcccgataaagaaaattaattcaggtgactaccggctggttcacgatctgcgtgcaatcaactcaattgtggatgcggaaacacctgtcgttcccgatccgcataccttgcttagtaatatcccgcatgatgcgtgctggtataccgtaattgatctttgctctgcctttttttctgtaccgctgcatccagactctcagtacctttttgcgtttacgtataaaggtcagcagtacacgtacacccggctgccacagggttatgttgaatcaccgtcggtttttaaccgtgtgctcgctaatgaccttcagcatcttgatgtgactagcactgtactccagtatgttgatgacctgctggtgtgtagcaatacccaggaacagtgtactcaggattccctgacggtgcttaaagcgttagaaaaaggcggacacaaagtctcaaaggacaaacttcaattctgtcaaccacaggtcgagtaccttggtcgccagctgtgtggcaacaagcgcgctatagccccgagccaaatagaagctgtaagcaaggctccaaaacctttaaccgtttcccacatgttatcatttcttggaatgacaggctttagtcgcccttggatatgtgactatgctattaaaacggcaccactgcgtggattgatacgcgcagcagggcagaataatggttcagccgtattacactggactactgaggccgagggggcgttccaagcattaaaacaagatctgcagacagctccggcgttaggtaaccctaattatgctaatatgtttcatctgtatgttgccgagaaaagtggctatgcttgtgccgttttgatgcaagacacaccaaccggcaagcagccattggcgtactattccacgaaactggataatatcgaaatgggattaccgccttgttatcaaggtctggccgcggccgcgtttgcattccagaaagcttcggcaataactatgggccaccccaccacgctctacacaagccaccaattgcatgctctgattacctctccgagatttgttttaacccaagcgagaaaaacaggttatgaagtgatcctggccgctccggaactcaacattcagcgatgcgcaacaatcaatcccgcgacccgcatggtcatcccgttggaaggcaccccacatgattgcatacggagcactgacgaattcctgcgtccccgtcaggatctgcataaccagcctattcctgcagaattaacccttttcgtcgatggctcttgctttcgagataatactggtaatcatgcagggtatgccatcgtgcagttacatccggatgacacgttcacggaagtgcaaacaatcaaactggcccagccttgtagcgcacagttagccgaaattaaagctcttacagcagcctgccagctcgccgcgggaaaaacactgaacgtctataccgatagtcaatatgcgtacgccgtttgccatattcatggcgtgatttggaaacagcgcgggtttttgcgggcagacgggtcgcctgtaacgcatggagaagcaattagtgcattgctggacgcgatacaccatcctaaagctctcgcaattatcaagtgcgcagcccaccaaaagattgattccttaattgcaaaagggaacaacctggctgatgaggctgcgaaacgtgccgcgacatccacttgtatcggttaa

SEQ ID NO: 370 - DNA, 1995 bp, synthetic construct
  source 1..1995: mol_type = other DNA
atggctagcgcatggagtcatcctcaattcgaaaaatccggatgtttgagtttagaagaacaagagactctgttcgcttcagttcccgactcaatttgggccaaagatgattatgattttggaaccctgagtactgctccgcctcttgttgtgcatgctagaaccatctactacccatcccgtgcccagtatcctttatctaaagaagcggaacagggaattgagccggtgtttacgagcctgctcaaccgtggtgcaatagttccgtgtccgagctctccagtaaacaccccgatacttcctatcaaaaaaccggacggtacgtaccgcttcgtgcaagaccttcgtattgtaaacgacgcgatccatagtcgtcaccccatcgtgccaaatccgtgcactattctcagctcattgcccgctactgcgacatggtttactgtcatagatattaaaaacgcgtacttttccattaaggtcgatccggcatcgcagttctggttcagttttacgtttaaaaatgaacgttttacctgggctcgtttacccatggggtactccgaatcgcctagtgtctataacgaggccatggtcgcgtgcttgagaaatttcacaagccctgctggtagcacagtaatttcttatgttgatgacatcctgatcggctcaccatccaaagaggcctgtaagatagacacggttgccttacttacatatctcgcttccgttggcttaaaagtgtccaaacataagctgcagctgtgccaggaaaaggttaagtatcttggtcacattcttagtccaggcaatcgggctctggatgcaacccgtatcaccgctattaccgcttgtccgcggccgcgtacgaaacagcaggtgttacgattcctgggaatgactggttattgccgagcatggattcttaactattcagaaattgcgcagcccttacaactgtgcgctacagcctgtaaaaatctgacagatgttgtaacttggacggatgactgtgagacagcctttcgcaaactgaagcaggcgctggcaagcgcaccggcgttgggcttgccaaattatgatctggattttcatcttttcgtttgtgagaaaggtggttatatgagcggagtgttatgtcaactgcatggtgggaaacacagacctgttgcttacctgtctaagcgtcttgatcctgtagcccgcggctgggttccatgcctgaaaagtgtcgcagctgcgtcaagcgcagtattagcgtgtgcagatcttgtactgctgcacccgttgacggtgcatgtgcctcatgatgtccacgccctgctgatgcaggccaaaacaacccatctgacaactgctcggctgctgtcatatcagcatgttctcctcgcactcagccatgtcaaacttgttcgctgctcattgctgaacccgtcgacgctgcttcctaccgaggaagacggcgaatcccacgattgctgtgatgttattactatctgtacaaaaccacgccctgacatatctgaagaaccgttatctaatccggatctgcttttttatgttgacggttcgtgcttacgcttagactccggagaagttggctctgggtatgcggtggtgaatcacattcgggtagtggaatcgtatagtctccattcttcattttctgcacaatcggcagagttagttgccctgattcgcgcgtgcatcctcgccagcgggaaaagtgtgtgcatctacaccgatagccaatactcatgggcagtcgtgcatgatcatggcgctatatggaaagaacgcggctttttaaccgcggccgggaaacccattcaacacaaggatctgatcgaactgttgctcaaagccatacagttgccaacggccgtcgcagtggtcaagtgtgcagcgcataccaaaaataacgacgaggtatctttggggaatgcacgagcggatgcggcagccaaaagtgcagccaagggtggagtaagaaattaa

SEQ ID NO: 371 - DNA, 2004 bp, synthetic construct
  source 1..2004: mol_type = other DNA
atggctagcgcatggagtcatcctcaattcgaaaaatccggattcaactcagatctggggaccgatattcttacccaggtgccagatcagttatggagcagacacgagactgatgtgggcttagcggtttctgcttcaccagttgtggttaaacttaaacctggcgccgtcttaccctggcgtcctcagtataagctgaatccggccgatgaggaaggcatagcgaatcttatagatggtttttcaaaggctggggtgttagttgaaatcagctcgccgtgcaatacacctatccttgcggttttgaaagcagacaaaagtaagtatcgattagtccatgatcttagagcaattaatgctattctcgaagaggtagctgccgacttcgctaatccgcatacgctgctcaacgcaatacctactaaggcaaagttttttaccgttattgatctgtgtagcgcttttttttcaattcccttagccgaagagtcccggtatctgttctcctttacgtttcgcggccgtcagtacagctatgcccgcatgccgcagggtctgaccagctctccggcgtggtttgatcgtgttgtcagccaggatctgcaggaattggatctgagtggtgtcatcatacgatacgtggacgatgtcctggtatgcagcgatactattgaggactgccaacgggatagtatcaaagttttgcagcgtctcgcagaatgtggtcacaaagcctcgagaaccaaacttcagttctgccagccgcaagtagaattcttggggcgtgtaatttctcacggaacaattgctttatcgcctgatcatctgaaaggcatctcacgtgcgccacggcctcaaacctgcgcccagttaacgaccttcctgggaatgactggcttctctgccgaatggctcgaggactatgccgtcaagacagccccactgcgcgaccttctgaaaagttccgaagacaaaaccttaaaaaaaagtcttgagtggaccacagaagctttgatggcgtttgacgtattgaaacaagaattacaaagtgcaccggcgctgaaaatgccagactacgacaaaacgtttcatctttatgtttcaaaccgttgtaacatgtacgctgccgccgtgttaacacaagatagctgttccgggggccgtaaacagcctatagcatattactctgcaagattagatgacgttgcacggggctggccgccgtgctatcagggtttagctgcggtgcacatggcgtacgaaaaagcgtcggccattacgaaaagttatccagtggttatctacactcatcacaagattacagagctgatcaaccattctaaactggtgctgaccacggctcgatgcttgcaatatctcccgttgctcacctatcccgatgtaacaattaagcgctgtgagactactaatccagcaaatatgctgccgttcgagtttgaaggtgaaacacacgaatgcgtcgcggaaaccactcgctatacaaaacttcgcccagacctggaatcagaaccgttagatgacgcacaggtgatctattttgttgatggatcctgctttcgtgatcatatgggtacgcatgccggttatgcggttgtacaacataaagaaggtacttttgtgacggtgaaagctgagaaatgtctccagccctgctctgcacagctggcagagctgtatgggttaaccgccgcctgtgaactggcgaaaaatctttccgcgaacatctacacagatagtgcttatgcgcatggtgtatgtcacctgtttggagcagtttggaagctgcgcggattccagaaaagcgatggcaaaccggtgcgccatggcaaacagattatgaaactgatatcggcgatgatgctgccccatcggttggcaattattaagtgtcctgctcatcaaaaggataactcctctacgacaatgggtaataatgcagcggatgaagccgcaaagtgtgcatcaggatgtaaagtcgcttaa

SEQ ID NO: 372 - DNA, 1980 bp, synthetic construct
  source 1..1980: mol_type = other DNA
atggctagcgcatggagtcatcctcaattcgaaaaatccggagcggccctgcctgagctgacggatgtagatccgagactctgggcagaacacaaagacgatgcgggtttcatcgacgtaccgccgtatgtggctaatttgctgaaagacacacctgtatactgcaaacagtacccactgtcgaaagaaaaagaagatggcatacgcccggtgatcaaacagttactcgcccagggtatcctgatccacacacactccccgtataacacgcccataaaccccattaagaaagccaacggatcatggagactcacgcaggatctgactaagattaatgagctgattaaaccgcttgcgcctattgtcccagatgtccatacgatacttaactcgatccctgcaagccatgcatatttcactgtaattgatatttgtagtgcattcttttcggttcctgttgatcccgttacacagccactttttgcttttacctttgaccatgctcagttaacatggacccgcttaccccaagggttttcagatagccctgccgtttttagtgccctcgttcacgcaacattgatggacgccaaactgccgccggacacttgtttgctgcagtacgctgatgacatactggttaccggcgcatcggaagatctgtgcactgcggcgagcactatcgtatgtaatattcttgcggaagctggctttaaagcgtcgaaagataagattcagtgggtcaaacgtaaagtggagtatctgggacatgaattgtctcagggtaccgtccgcttatctgcagaccggatcaaagcaattgccacttataaacacccgtctaccaaaaagcagatgcaaagttttctgggcctggttaattactgtcgttcatgggttcccaattgtagtatgtatgataagatacttagagctgctaccttacaggattccgacgaaattacatggacagcggagatggatcaggcttttacgtatcttaaaacctcattaatccgaccgccggcattaggtctgccagtatatagtcaggagttccatttgtatgtccatgaggacgggggtacggccgccgcaatattggctcaagaacatggcgggaattttcgtccagtcgcatatctgtctaaaaccctcgattccgttgctaaagggttgccagcctgtttacgggcagtggccgcggccgcgatcatggtccaagatgccgagcgtattgttttatctcacccgctggtcgttcatactaaccaccaagtgggagttatcatgcggaatattagcacgcagcacatgacagcgcagcgtcgatctggttatgaagccattctgcttgccaccgcaaaccttactctgaagccgacctcagtggttcactcacctacgctgtgtttacataagctgttaacacagggcgattttgaggatgatgatcacgactgcctggctcgcatacaaataagcaccgcatgccgtcctgatgtatcaacttccgtgctcgaggaaggtaatcattggtatgtggacggatcttgcttcaaacccaatgataacgaatacctgtgcggttattccatcgtggaattgccggatcgtattattgaggcgtactccttgccatataagtcagcgcaagtagcagaactgattgcattaacccgggcgtgtcaacttgcgaaaggccagtgcattaatatctacacggacagcaagtacgcccatggtattgtgcatgattttgccaaactttgggaagaacgcgatttcaaaacaagtgaaggcaaacctatcagtcatcatagcgttgtggccgaattaatacatgcagcacaactgccaagcaagcttagtgtgattaaagtggcggggcatgtcgcaggtgaaagcgaggaagcgaaaggaaatcgcctcgctgatgaagtagctaagtgggctgctaaagacgttatcctgtcttaa

SEQ ID NO: 373 - DNA, 1998 bp, synthetic construct
  source 1..1998: mol_type = other DNA
atggctagcgcatggagtcatcctcaattcgaaaaatccggaaacactgatcaccctgcactgtcgcatattcttgcgggattaccagacactttatggtcgcaggggagtgccgatgttggtttggtacattgtccgcccatctacatacccctcaaaccgggctaccaacccatctggaagtaccaatatccactcaacaaagaaaaaatcgagggtatctcgggaactatcaaaggtttgcttgaagcaggcgtgttacgtgaaaccgaatctctttggaatacgccgattctgccgaccccaaaaccgggcaagagagactatagactcgttcacgacctgcgtccgataaaccaagcaaccgcgacgaccacgtggtccacgccaaacccgtatacaatgctggcagccctgtctcctacacataattggttttcttgtgtagacataagtaatgcattcttttcctgtccgctgcacccggactctcaggatatgtttgcgtttacgtatgaaggtcaacagtatacttatactcgtctgcctcagggcttcacagaatcaccagccctgttcaataagattctgcgagatcagttacaatccttacccattcctcaggatgttgtactgctgcagtttgtggacgatatctgtttggcagcggagtcagaagcctcaattattcatgccacaaagatccttctggaacggctgtttgatctgggctataaacttagcaaagaaaaattacagttaggtcgccggcgcgtcacctttctgggtcgtgtggtcgctgctggctgcactagtattaccccgtcccaccgcacggatattctgagtcatcctaaaccaaccactgtcaagggtatgatggctttcttaggtttgacagggtattctcgtcagtatatacccgactatgcggcgctgaccgcgccattacggttactgattaccacggctgggcatgcaaatcttaaagcgcccctggtttggacgacggatgcagatcaggcctttatcaccgttaaacagctcttgagcgcagctacagtcctggcgccgcctgattacactcagccgttccaccttgatgtttcggaaaaagaggggtttgtgaacgctgcactgtttcaaaaaggcggtgggggagagcggcacgtcttaatgtattacagttccaaacttgataacattgagattggtcatccagtttgcacaaaacatgtagcagcaattgctaaagctctcgaaaaaaccagccatctgacaatgtgccaccaaaccatagtgcatacaatccatggagttgctgcgttcctcaacagttcggccttttccctgagccatcgcagaacagatcgaattaaggacctggttttacagtctcatattacattcacgggcgaaggagtcaatatggcagaaaacatgtcaattggtgaggcgcataattgtgtgaaagataccgagactcagatgcgcgtaactcctacgctctctagcgttccgttgtctaatcctgatcttgtgttgtattgtgacggatgctgttatcgtaaaaactcaggcgaattaatcgccagtttagccgtggtgtcagggaagatagggaataatttgacaaccgttaaagctgagatcgtgcctcaaccagcaagcgcccagaaggccgagattgcggcactgacagaagcatgccgctacgctgaaggcaaaacggtcaatatctacaccgatagcgcgtacgcccatcaggccatacatgtagacattccgcactggctgcgtaaggggtttgtcaccagcactggtatgttaattaagcaccttaaagaaatgactgatcttgtagaggccgtgcaactgccgaccaaggttgctattttgaaatgcaaaggtcaccagaaatcaaataccgaaatagcgaaaggcaatgaagccgccgatcatgcggcgaaaactacagctggctattatgatcagtaa

SEQ ID NO: 374 - DNA, 3987 bp, synthetic construct
  source 1..3987: mol_type = other DNA
atgatgtatacaactaagtcaattctgtgccgacgtctccctcgtcttagacaagctgagaaccaggtgagcagcgcttgccgcgtgcgaactgaaaaggggatcacattacttgaaggggtacacgaggccatcctcgagaactcctcgacgcgatgcggaagtggtgtaactaagcaacccgtcgccaccttagaaaagggttgttcgactacgttgacttggcgccacttagacatcttgattgccgggatgggatggaagaacgacagcgaagtttgcgtacgcacggcgaaacgaagagccacgaagtcctcagaggtatcagtccatcaggggacctgttgcgtcgacactggggactttacagacctgaccgacaaccttagttttgttgagagtaatgacggtgacgagccgagtataggtggacaagatgagccgaatgaagaggagacttccttagaagcgggtggtgaaatcgagggtacacacgcgaactttctgggcgaggccaccctggaagtggaagagatacaagcactggaagaccctcagccgaacttggaaatacaagaacaagccgagatgccgaaccaggaaatccaagctcaagtggatgagcttcctgaccaagaaaatcaaggtgaagtgaacctgcgcggtcggccaattgtcgacggcaataagatctattacgaatacaacagtgaatcgggcggcgcgtgggaatgcggtcaatgccctgaagcgttccctgacgtgaagaagctcgaaagccattaccggggcactcacctggactgcgtggtgaagtttaactgcagcaaatgtggccgtaactttgttgcaaacggtattcttatccactaccgtaagtggtgcaaggggcgcccgatacgagtcgaccctgatcgcaatcctcatcaatgctcggaatgcgactactcagcagcgtcaaagcgcggcttgtctcaacacgagcgccaccggcaccctgaactgcgcaatttaaagcggattgcgcaacgtggcgaggacgcgcgtcgcaagcgaacagctcgtaagctgatccgtcccccaggtcgcggcggcaaattgtggagcgctgaagaggatgacattctggagcgcttatgtatagttcaccaggggacacgccttatcaacatggcgatcgcagggacgggccttcttcctggtaaaaccaacttacatataggggaacgtcgtcgacaatggaaggaaatgaaagcaaaacaggtagaggaagggttaagcgaggctatggctaatatatcattggagccgcctgtgttgcctacgcaacgctgtctgactgagctggaaacgtatttagaggacgtgaaggggatagcagtgaagagcgacattgggaccactttatgggcttgccttaacgaccatgtgaatggacaggcgttacaaagtgagcagatcgacgagattactaagaagatcgttatagagttgggtaaggccaacccccgcgctaagcgtacagggaaaacaaatcgcaagaaaggtaagaaggccaacaacggggcgacggagtttagccggattcaacgcctgtttgcaactcggagaaaagtgcttgtcaaggagttgttggacggcaagcgtgatgctgactgtcctcttgacgttaaggtagttgagcaaacgtaccaagggagatttggtggagagtcaaagattgtgaacctgcagggcttccctgcgccagaatctcttgcggacaactccgagctgttacgccctattaaccgtttagaagtgagacaagctctcggcggaatgaagaatgacagtgccacaggccccgacggcgttaaggtgctgcctgtgaagaatcttgagaacagaactggtacgatatcactgatacttaacgcgtggttgtactcagggatcgttcccaaaggaacgaaggccaaccgatctatcctgctccctaagacggaagagggattggaagacgttggcaactggcggccgttaacaatttctagcgtggtgctccgctgctacactaagatattggcaaagcggcttcttaaggctcttccactgaacgagagacaaaagggattcagacaacttccagggtgttctgagaacgttaccctggtgaatgaggtaatatccatggccaagcaagacagcaaggagctggctatcgttttcctcgacctcgctaaagcattcgacaccgtgagtcacgatcacttagttaagagccttaagcggttcggagtggacatgaagttcatcgatattgttgtgcaactctacgctgaggcgtctactagtttcactgttgggttaaagatgaccgacataatcctcatgctttgcggtgtgaagcaaggggaccctctgtccccgatcttgttcctggcgtgcatggacccgctgatgtgcagtctggaaacccgtggagctgggttattattggcccacggagtgaccgttaccacaatggcgtacgccgacgatactgcggtggtggccgggtcgaaggcaggtatggagaagaatctggaactcgtgaaggaattctgcttagaaactggtttaaagttaaatgtcaagaagtccgtgggtttccacttaagaccaatcggcaagtcttatacggttaacgagggctcccaattcgagtgtggcggtgaggcattcccttgggtaatgccaggttctgtcactaagtacctgggcgccaagtttgacccgtggcgtggtatcccagtggttgacccttgtaagaagctggaaggatgggcgcaacggatccacagagcaccgttgaagccgcggcagaaggtgtctttattgagtgactacgcctgtgcccgcctgatgtatcacatgtccacggctactcctagccgcgggagattagacaaccttgacagcatcgtcagatactgggtcaagcgttggctgaagctgagtgactctactaacacacacttcttttacaccggctggaaggaaggcggactggggatctccaagtttgcggcgtcggttccacatatgatcgtaggcaagttcgaagcggttctccgctccaaggacccagttctggtaacactctcgggaataagaaatcttcgccagcgtgtggataaaataaaagagaaataccatgtttgcggtctgaaaacggacactcaaaaggctagctggcgtgaagaagagagtaagagttgggctaaacttattagccaagggaagggcgttgaatgcatggcaggcaaccctcagtcgaatacatggattaacggagagagcttcatgactgagtccgagtatatcgccgcactgcaactgcgcactaacacatacccgactcgcgagtgtactaaccggggccgtgccggagcgaacattatgtgtcgccggtgtgggttagcggttgagacgatcggtcatatctcgggttggtgtctggaagttaaggataaccgcatagcccgccacaaccggatcgtttacaaggtcaaggccatggcggagaagaagggcttcagaacgctgcttgagccaaaagtcaaggtagacgggcgcacgcttgtccctgatctcatcatatacgacggagcttcacaaaaggcaatagtcattgacccaaccgtcgtttgggacgacagcggtactgcgctcgacgacgcggcaagaagaaaagtagagaaatacacatgcattatacccgccgtcaagaccctgacaggttgcaaggaagtccgtattcaggctttagttatgggttgtcgtgggagttggcacggtggtaacgacggcttggtccaaccactgggatggaagcgccatgatattaagaatctctgtttattaacactttgcggcacacttaagctgatccgttacttcatggacaagtacccatacgatgttccagattacgctctcgagcaccaccaccaccaccactga

SEQ ID NO: 375 - DNA, 3414 bp, synthetic construct
  source 1..3414: mol_type = other DNA
atgtctcattccacagcagcagcttcttcgggcgcagctacaggtccaatagtcatcagatacccggttaatacgactaacggtggaaccacgggtgagcaagcctgcttcttcgctgaatcatcaaattgcggtcttgcatttgttgacaacaagtccttcgtggatcacttattgcgggcacacaaggctacgcgtgaccaaattcaatacatttgctcccactgtcaccggcaatttgagaaaatagagtcagtgcggtcccatcacaatatctgcaagcggaaggaagcggtcgctccagaccttgatgcaagacttcccgtagagtgcgaggtagacggatgttcacgaagattcacgacgacatctggaatgcgcctgcatgttaagaaggcacaccccattgagtaccacgcaagcataccacaatccaagcgcaacctgtggtctgagggcgaaatgcgcatgttagctcgtatggaactggataacccgggactgactaacgcgcgtatgaacgagttactgcacagtctgcacccttcacgaagcgtcgacgtgatccgtcacatgcggggccggaacacacgctaccgcgaaatcatggaagaactggttctgataggtgttccagaagatagtgacagccaagcggagaagaccgccgagccggagcctgaaggtcggattaacgagtgtcaattagaggaactggtcaagactcacagccaaatcgacgatgcgcggtaccaagctagcattgaatacgtgcgtcgtgtactgcgctcagacgacccaggtgaattcttcaacgattggttgttctcgtgcttcccgggcaaagagggacgccgtattcagagacgtaaacgcgaaagacttccaccgcgtaacgccaaacaaaagcgcgccgctgaattccgggtgctgcaggagctttggcgcaaggaccgttcccgcctcgcaacggtgattttggataagatgcccccgactgcgaaagagcccccaattggcgatatagagaaggtttatacgactagattcgagcgtcctagcccggaagaccaacatgaattcacctctaagccgattgaagaaccaatggagatggtccggtttataacggtggaagaggttctgaagaacttaaaagcgatgaagagcaataacgcaccaggtttagactcgaacatcaccatgaaacgcttgcgttcgctcccgctgccttgccttcagctcgttttcaactgttggctggctattggtaaggcaccccaatccatgaagcagtgcagaagcaaattattgccgaagggagcagagggtctggacgacgtcaataactggcgacccctgacaatcggttctctgctgatccgtttatacactagaatcttagctatgcgtttgcaatctaaggtacaattgcacccgcgccagaaagcgttccaacccttggatggatgcggtgagaatattgcaatagtcagttcgttattacaagacgctcacgagcgcaagaaggagttgaacatcattttcctggatatagccaaggcatttgactgtgtctcccatcattctatccagcgtgccctgaaccggtttggattgccccgcgcgtttcgtagagttatagaagacttatacgatggcgccacgactgtgttccaaacgtccgagggtgatagtaaaacattggggatttcaagtggtgttaagcaaggctgcccattgagcccggtcttgttcaatatggtcatggatgagttgatagctgacgcgcccagcaccgagtggggctacgagcttcatgacgaaagtgtaggcttgcttgccttcgctgacgacattgcactcgtttcacacagtcgtgccatgatgagccatgcattggactatgccgccggtttcttcgagaaaagaaaccttcaactgaatgcccgaaagtgtatagggctgtccattaagaaagcacctcgcagaaaagtaatgcggatagagatggggtccatttggtcccttcggaacggtagtgacaatatccctattaagatgttatccccagccgacatggcaagatacttaggtgcgctgttttcgccttccggcaaacaaacgatagacttggccaccatgaaaggttggatcactagtatcgaaaagtcccggctcaagccgcaccagaagttggtgatgttacgcacatatctgttaccacgcgtcctgcaccaccttacgataggggagcccaacgccacaacattaagacgggtggaaagagagctgcggaacagcgttaagcgattcctgaagctgccggtcgctactgcaacacctttcttccatatttcaacaaaagaaggcgggctcgaactgccaccattgcttgagacgatcgccaaaagaaagttgaaatgggagatccgattacaaaagtcaaaggactctcttatacgcgcagtggccgattcccctaaattccggaagcaattcgataaggcacgggcctggattggcgtgccggttatcaatagacctagcgacatcaaccgcagaattcgtgagctcaacaatggccgtttcgaacgctttactagcgagctcgcggtacagagccggtgccaccgagcactcgcaagcaaccctcttagaaacgactggttgaccgggcacaacccggggttgtacgcctcacagttcatcgacgccttaaagttggtcacttcgcagctgccgacacgagaggcactcaacagaggtaatccacaagcggataaacgttgtcgcggatgcgggttctcagttgagaaccaaaagcacgtcataagtaattgccctctggttcaacaagaacgtcatctgcgtcacaaccgtgtagcgcagttattcgctcgctatgctaaggaaaaggggtggaacataattgcggagcccagaatacgcaacccatccggcgagatcatgcgtcctgacatcgtgttacgacgggacgacaacgtagctattgtagacattcaaattccttacgaggatggtggtcgggagcaattggcggaacgctaccgccagaaatgtagtaagtaccgccaattgtctacgcatattcagcacgttttaggggttaccaatcacactataggcgcaattatcgtcggggcatgcggcacctggtgcgagttaaacaacccgatcctcgactacataggcgtgaacaccaccgcgatcaagaagaacctttcgatagaagcactgcgcgggacactcaaaatctttggacaattcaagaaccgtgttttccggaacgaacgtgtacacccatcccaacgccctagctcaggaccgccggttccgtacccatacgatgttccagattacgctctcgagcaccaccaccaccaccactga

SEQ ID NO: 376 - DNA, 3717 bp, synthetic construct
  source 1..3717: mol_type = other DNA
atggttacaatctacacagaatttaaaaccgatccgggtgctggtgcccgcgtggtagcacttcgggttgatgccggagcgaaggcgggctacgtaatactgcgttctgagggcgttcatgggcacggctactcaggctccggttcccgagatcgagctctcagtgcggcaggaaagattgacgagcctatggaaacgctcgatcgcaagtcttccttccgccttccctttaagatcttgattttcgagagtggccgccgcgagatggacggagaattaagcccgtctctggatttcgtgaatcgcgctctggacgtccaagaatcgcgtgaagaagaggctctgacgttgggttccgaagagccgacggaaccattgtccaacgggagtgtttacatgcctgctagtagcacggaaagaggaattgccgatttggcagaggacgggcaaacaggtaaattgttaattcccatgcccctgcgcacagttgcatgtccctgcaaccaggtattctgcaacgtatatgagtttgagattcacatggagcgagcccatatgggcatagatgtgaagtatacttgtgatctgtgtggcaaacattgtcttcgggttcacggcgccaaaatacacagatcgctctgtagaggaaacacaatccggccggtaatacctagaccttggaagtgtgaggcgtgcgaggaagcgttccgtagtaagagcggtcttagccaacacaagcgccatcgtcatccggcgttgcgtaacttagagcgaaaagcgaagtacgtgaaggagccgggccaggctaagcccctgtttaaagcaactaaattatggtctattgaagaaactaagcgcctgttggagctggagaatgagttccaaggtaataagaatatcaacaagttgatagctgcgcagctcgccggtaagagcaacaagcaggtatccgaccggcggcgcaccgtgcacaaggctaaaactaatattagccaagacaagggtgttacagccggcagaaacgaggatcgtgtaacgggacctggcatggcagtttctgagacggttaccgaccccgaagctttctgggactttgtgacgggcgcgcgtaactcgggtgtcgaaggggagtcgcaccaaaagactctgcaggtccttgtcgacctgctgcaggaaggcaacgtagaacgggcatgtagtcaagtctctgagattctggctgatatcacacccgtaactaagccccaaagtaagtcaaagaaaggccagggtcctaagaacagacgcaagtcacaggcgaaggcagaagcatatcgtcacgcccagcaactgttcgaaaccaacaagaagtctctggtcgcagaactgctcgaaggggctgagtcgaccaagtgtccattatcggttgaaaccgtatacgaggcctataaagcacgtttcgagactgagtcgccagaggtagacatgtctcatttcccgcccccggtgaacggaatggactgtgacaacatactgaagccaatcacgggcgaagaggtgtacaaagcagttcgcaagactcgcccggatagcgccagcggaccggacaagatagacgttcgttccatacgaaaatgggacccgcgtggcataaaattggctgcagttttcaatatatttctgttaacgggcaaggtaccagacgccgttcggccaaatagatcaatactgctgtacaagggcggtgaaaccacgcaagtgggcaactggcgccctttgaccattgggtgtatggtgttaagactctacaccaaggtcctcgccgcacgttttatgtttgcgaccccgatttccccttgccagcgcggctttgtcagcggcggtagttgtaacgagaatgtacatttagtcgaggggcttgttagagacgctaagagaagaaacaagcctataggtgtgtgtttcctggatttagccaaggctttcgacacggtgagccacaagcacgttctggcagggttaacgcgattcggagcctctaagcacgttacgcggattgttgaggatctgtacagaggtgctagcactagatttaccattcctgacggaaccaccggagagatcgagatgaagcgcggcgtaaagcaaggtgacccgctgagtccagtactgtttaatattgcgttggaccccctgttttgtctggttgaaaaggcaggcgtgccgtacgaactcgaggacggaacgcctgtgagtgtagctggttacgccgacgacacgatggtggtcagtaacaacaagaacgatctccaagcgaacattaacttagtggaagagttctgccgagctgcgaagttaaagttgaacgccaagaaaagctacgcatacacgatccgtccaatcgccaaaacttacgttgtaaattgcggggatcaattaagaattgaggctgaggcgataacgtggatcgagccgggagacaccgcaaagtacttaggagtcgaacaatccccgtggatccgaaaggtgaaggataatcccactgaggatttgaagtcatggtgttctaaactcgggcgggctccattaaagggtcggcagaagttgttacttttgagtagacacgttctgcccaagttgaagtaccgcctggctaattcggacccttcaaaagaggtattggctggcttagactccgtctcgcgtgaatacacgaagcgctggatgaaccttccggcttgtgtctcctctgcctttctccactgttcggtccaagacggcggtgtgggtcttccgagcttagcgacagaagtaccacttgacaagataggcagcatgtcacgcttaatagggtcacaggacggacacgtaaaacggctggccaaggccatcggtatcgaggaacagcttgaaacgacctgccggcgttgggagatacgacgtccgctgaacaagatgcgctgtgtcgtgaacgaaattagaaagagacgtcgggttgaatgggagaacctggggtcacaaggaccccgaggcccctactggagaagatgccgtgcatcaaatggttggatgcgtcgtgacgtgcttagcgaaggtgaacatacggtggcgctgcaattgcgtacaaacacataccccacacgtgaggcgatgtcaagaggtagaaagggcactaacgtcatgtgtcgtcgctgtgggcaaagcgtggaaaccctgggacacatcactggccaatgcttagctgttaagggtaaccgtattaaacggcataacaaggtatgtggaatactggtttcggcggcacaatcgcaaagttgggaagtcatgatcgaaccacacttcaaggtcgaagacaagacttatataccagacctcgtattcctgcgtggagaacaggcagtgatcgttgacccgacggttgtttgggagagcaattcaaacagcctcagcgaggccgcacgcaagaaggtggtgaagtataaccccatcttaaagacggtcaaagatttaacgggaaaatcatcagtgctcttgtttggtttcccggtaggtgggcgcggtacgtggtgtcgtggaaataacaaggttttagacgcactcgggataccacgaagcaaagcgcaatatatttgtttaacagttttaggcgacactttgagaatgcttcgagtctttatggacaagtacccatacgatgttccagattacgctctcgagcaccaccaccaccaccactga

SEQ ID NO: 377 - DNA, 4119 bp, synthetic construct
  source 1..4119: mol_type = other DNA
atggccgagcgcaattgttcagcaacttacattgagggtgcaactgctcctagtagtgcaagttcaggcgttggcgccggtgatgactgccccgaagtagtggacccgccaggtaccgctacttgtgaagtctgtgacgcgaagtacagaactggccgcggcctgtcactccaccaacgttcgcgccatccagaatggtatcattctcgcaaaggccccgccttcgttcgcccgggttggacacgggaagaaatggtcttgcttgttcgaggagaggtccggttggttagagctgcgcggcgtagaggcgaagagggacgggtgaaagtgaacgcggagttatgtagacaatttcccggtaagaagcgggacagcatagtaaatgttcgtaagactaagaattatcgcgatctgcgtgctcggcttgagattgagcttgaggaagaaagtgacgaggaagtggagcgggtggtaccggcgccagaagtgggactggtcccagtggagatgcgcgaaggcggaggaggcggagaggtaggcttagtagcctcaggcggtggtggtgacctgagtccaacaccgtcgcaagtggagagaaagtgggtaacgcccgtaccgaaggaccgtaagggaccgaagttacgttggggagaggaattacttgaagaggtagcgcgggaagagcttcgtctgtcggggttgaacacccgtttcatgaacgcagctctccgtaactccttcccgagcagaactttggaagccatcaaagggatgagacgaaagccgaagtacaagttgctcctcgcgtccttgtgcgcgccgaatccagcagtaacgccaccaggaccatctcaatcagaagagggtaccatgctcccagaggtcgaaggctctggtgaggggtgcagtcccgaacgcgaatttgtaacgccaactgtatcggtgaattttaccggtcctctgcaaccgactttcgtcgagggaataagtccgcccagcgttatacgtctccctgtagcatctgatcccccgaaaggcggccgacccgaaatagttagtgatgagtgcaatgtcacggggttggtgcacatggactctgtagaccacgattgtacgttggttcccaccgaaagtactataggcgacatcactctttgcgatcatagcgtcgtcgagatagactccctgctggtggatactccccctcgccgacgtgagggagaggttattgaatcaactgttcgggacgatcgtcgaggcgatgagggcggcgaagtcagattacctaccgagcctgacgaagactcggaaagtgagtcagaaccaagcagccaaccctgtaacccccgccaaggtgacgtgtcccagacagtcggcgagggcggtggtcgcactgtagcgggtcgagagccaatggattacgaaacttgggaagcagagttgcgtgaggagttggtctgcgcacagggatttcttgccggtatggactccctggagttccttgacttccaacccgggcagctgagccgagagcacagagagatgttagactcagagtatcagcgatgggtcgaactggaactgggatcatcacatcgacgtaaaggcccacgtcgtcgtgcgagaagaagagaagcggccggaagaaaagaggcggccgggccagctgaggccggcggtcgccgtaaacgtcgtcggactgagtacgccagagtgcagaagctgtaccgatctaaccgcggggaatgttcccggaaggtattgtcaggagagtggagatctgaggagacgccctctattccactggaagaccaagttgtgttctggtcacgggttttcggagaggagagcgtgcccgacactcgtacgggatctccgcagggtatggtactgtggggtttagtcgagcccattacggtcgaggaaatcttcagcactttgcgtaagacgaaggatggtgctgtcggtttagacaagatttctcggaaagaaatatcgaagcttaaccctcgcgcgctccaagcacacttcaacttgtggctttacgcaggttatcaaccgattgaattccgtcgatcgcggactgtcctcataccaaaggtacaagagccgtctggtcctggccaattccggccgatcgctatcggtagcttcattagtcgtgtctttcaccgcttattagcggaacggttgagtggtttattggaattccaatcgcgacagcgtgcgttcgtcaagggcgacggtattgccgacaatgtcttcttgctgcgttgccttctgcgcgacacttgtgtcgaccttaaaccgatgtgtttggcgttccttgacgtttccaaggcattcgacagcgtgtcccacgcaactcttctgcttgcagctgagcgaatgggtgcgccgggccctttcatatcatacctgagaaccttatactcagaggcgtctactgtgttgcacgttgacggacggtttagcgactctctcaaacaaaaccggggcgtccggcaaggggaccctttgtcccccttactcttcaattgtgttatcgattgggcgttagcgtcgttagacacagaaatgggtaaggtcgtcggggggggtccacgactgaaccacttagctttcgcagacgacgttgttataatcgccgaatctgtagtcggtttgcagcacctgtgcggccagttcgagcgctcgttaggccgatgtggcctgactctgaacgtggagaaaagtcgtacgttgcgtattgcagtagacggcaaagctaagcgatgggtctgtgagccgacaccatttgtctcgttagcgggcggcttaatgcccgccgtgacaattacccaagcttacaagtatcttggggtacacatctctgctcgtgaacgggatgcgacacccgaggagcttttgactagaggcttaaatcaacttaaagcggccccgttgaaaccccagcagcggatgtacatgcttcggactcatctgttaccaaagttacatcacaagttggtactgagccgctcacgaggcggggttttgaaccggctcgatcgcttagtaagaaagtccgtgagaagctggctggcgttaccccacgatacgactaacgtgttcatacactgcgattcccggcacggtggtctgggcattccggctctccgccttacaatcccattgatgaaaagtgcacgccttcgtcggctggccgccttgcgggaccctgtatttgtagcattaatcgccagctcgcgaaccttcgctgaagaggttcgccgttgcggagagccagtgaaaataggtgactcgacagtaacgtcagctccagctgtcaaggaagccctggcggagcaattgtactcctcagcagacggctatggcctgcgctctagcgctggcgttccatacgtgcacagctgggtatcagatggcacagcgctgatgagcggatcagcgtacatacatgcgatccaagtgcggggtgcaacgctggctactaagaaaagagcggccagaggtagaccagacgcgaatactgcatgcgagtgctgtggacgcacagagactttgggccacgttttgcaagtctgtcaccgtacctggggctcccgtatcaagcgccacgacgcgcttatggaaaagttccttcacagtttggagatacgcggtggttccatacttcgggcgcccgtcatccctgtagttggcggatcaccacaaaagcctgacggtgttatctatttccaaagccactgttgggtcgtggatgccagcgtagttgcggacaatgcggacctggacaacgcccacttaagtaaatgcgcgaagtacgatacacccgcggttcgtgattggtgtcaattaaactggccgtcacacgaaggagtgcgaggatcaatacgattcggtgcactgatctttaactggcgtggtgtgatgagccgcagatctgcccgcatgtgtgacgagctcaaggtaccacgtgccactgtcaagctgttcgcggtaggagttgttgaggcaggctggcgtatgtttcgcgagttccaccgctcgactgcgcaatggtacccatacgatgttccagattacgctctcgagcaccaccaccaccaccactga

SEQ ID NO: 378 - DNA, 3381 bp, synthetic construct
  source 1..3381: mol_type = other DNA
atgcctgccggcacttccccacccgttagatggcaagacaaagagacggtgcccgtgatagctgctgagagcgacggccggtgcctcgattgtgggaaacaattcaagggccaacgaggcttgtcattgcatagtcgctccgcccacccagagctgtatcacaagaagggctccgcggaaatagcacagactatacgtgaacaaacacggacgcgctgggacggagaagagtctgcggttatggcccatgaagaggtacgactcctgcgccaaggctgcatggagttgaataaagagctgagcaagttcatgacaggccgctccttccatagcgtgaagtcccatcggcgtcaacagtcataccgcgcgctcgtgaaagcatacgtgccgacaactggtggattgggcgtaaaagaggtcgccatcccgcctcgtaagacgaccagagtagtcggggaaatggcaccccggccgcatgctgatccacgtgaagatgaggtcgggcagcctctgcagcgtccggctgctagagttgctgaggcttgcccacctcgtttacatagcccaccgcaacaaagtactaaccagccaccggcggaagcggcagaggtggcgttcccatggccaaatccacttgatgaacacgaagttgaacttccggaaaccgtaggtattgacacacctacccgggcgaaggtagcgccaacacaagagcaggaaattcacgcgggcgacgagttcgactggcgaacaccaatacgccaaaccataatcgacttagcaactggtattaatatacaacctgagttacttcagagcagtacccagaacccgcccgccgactctggtagactccagaacttaatcgatcaagacatcatggagctcctgccgcctgtggttcgaaagggacaaaacatgcgcccaggagttcaacgtcgcgtagcacagagctccagagaaaagcgacgtgccgcatattcacgtacgcaggcactctacaagaaatcacgtacttcctgcgcccgcactgttctcactggcaagtggcgtgaagtcgctcctaacctgagtctgagagaacaagaagcgttctgggcaccgctgttagaaactccttctataccagatcggcgagctcccccaggagacggtgcgccggagtgggatattatggcgcccattacaacggatgaggtcgcaagacacttacgcggtatgaaagatggggccacaggaccggacaatcggacccttaatgatgttcggaagttgggtgtagcagctctggcgtgcagatttaacgtttggatgcttaccggtattgccccagaagctttccgccacggtgttacagtgcttattcccaagacaccagaaggtgctgagcctcacgactaccgccccatcacgataggaccaatacttggccgcgcgttccaccgtatactcgcggaacgtatcgagagacattatagaatttgcggcagacagaaagccttccgcaagggtgacggtataggcgagaatacatttctgttacgaacagtgatcgcagatcggaaggcccgaaatcagtcaactaatgttgcgtttctcgacgtgtctaaagcatttgactcagtatctcacgacagcattttcctggctgcagcctctgccggaattcctgaccccctggttacctacatcaagtctgtgtacgccggcagtcaaacccagctgcgtgtagacggtacattatctagagcaattagtgtgaaccggggtgtcaagcaaggggaccctctgagcccagttttattcaattctgtcatagacttggcgctgcgaaagattgatgacgagatcggtgtcagcattggtactgacaagttgtcttgccttgcattcgcggatgacttagtactgctggcatcaacccctcggggattgcaaagtcaattcaagaacattgaactggcattagggaagagtggcttgaagctgaatgtgaataaatcagctacgattcgcctcgacgtggacgggaagcgtaagacgtgggtatgcaatccgagcgacttcttgcggggccaggacggacaactggttaaggcaatgtcaatcaccgacgggtacaagtatttaggtaacagcgtgtctgctggggtgactctcggttcgacagttcaggacttacaaagaggtgtgcgtgagctgacggcagcgcctttaaagcctcagcaacgtatgtacatactccggaacaacctgatcccttcattacatcacaccgcggtcctgggatgcttgcataagaagtccctgaagttccttgaccagattacgcgtgcagcagcccgagcttggttgcgactgcctaaggacacaccgctcgcattcttccacgcggactaccaagacggcggactcagcatcccaagtctgcgatggaccatccctctgatgaagactaagcggatggcaggcgctgtcgcttctcgagatccgatggtcagagccatcgctcagttacccatatttgccagagagcgtcgtcgttggtcagctccgcttgccgccttcggagtacctataattaacggtgcaggtttgaagagagctatggcggttggacttcacacgagtgtcgatgggcatggtttagcggggagtcgtgtcactgggtatgtgaaccactggatggttagtggaaccgcactgatgagtggcagcggtttcgtcaactgtgttcgtattaaaggaaatttaccatacaccaaggcccgtgcggctcgaggtcgccccgagcggagtgtgaaatgcgacgcctgtcgcggccacgaaacgctgggccacatcttacagacctgtcccagaacccatcaaccccgaaacgacagacacgaccgagttaacaagtacttaacttccactttgggtaaattgggttttaccacccgcgtagaaccggcaattgcaactcctgccggagtacgttacccagaccttattgtgtggaaaggggatacatgcgccgtcatagacacaactatcgtcgcagacaattttgaccccgacgacgcccacgaacgcaaggttgtgtactacgacacaccagctattcgcacgtggtgcgcagacatatcgggagttccagcagataagatcaagttctcggcatgcgttctgacctggcggggtatgccgagtactcgttcagtccgtgagctgcaagccttgggtgtgagtaaagccaactggggcttaatgtccgtcaagacccttgaaggtgctgttgaatcgtacgcgcacttcggtaagagtacggccgggttcagcggctacccatacgatgttccagattacgctctcgagcaccaccaccaccaccactga

SEQ ID NO: 379 - DNA, 3507 bp, synthetic construct
  source 1..3507: mol_type = other DNA
atgcccctcgtaagcgaggtgaatgatggagagtgcgttgaatgtggtaagcaatataagaataaacggggtttagcgatccacgagcgatccgcacacgctgaaatctatcatgcccggtgcgctacgattattgaggagacacatcgcacccaaagaaagagtagatgggacagcgaggagtccgcagtgatggcccgggcggagtcaaagctggttcgacaaggtctgtatgccatcaatcaggcattggtgaaggtcacagccgggcgtacacttgaggcaattaagtcgcatcggaagttgcccgcgtatcgtcagatggttcgttcgtacttgcgtacgacaggtggcttaatcgtcgacgaggcagtggtaccagcacgtattgtggcagaggtaactggcggcgctacgagcggcccccaagacgacaactcgagacaagtcgatgaccgctcatcaccagtggctaccagagtagcagaggtcagatctcccggcccacagcccgcaacactcgcattcgccagtggaccagccggtcctacaggccggtccaatgggcgtaacatgaccgacaatcaaatcacaaccatggcggacgtacaccaagtgcttacaggtcgtattccatcgggagcaatatgtccgccagatggaaagaacaaaagaaatgtcacgccaagaccagaagcacgcgttgcggaaacccgtccattatcgcccataatcacccggtggtcagacgatgagacagatggcgaccccctgcccgaaacgcaaaatgtcaatacgcccgtgagagaagaccgtgagcgtgtcagtcaaggcattgcagagggtatcgtgggtggctacgactggcgtgcacccgtcaagaccgagctgcttaacctcgctattgacgcaaacatatgcccggagctcctgcatgaggttctcctttctccgtgcggcgatagagaattgctgcaagagcttattgacgttgatctgctcggtttctttccgcctgcggagcgtcctcgtcgaaatgtgcggcggcgtcctgagcagcaggcgcctgttacgagtagagccaagcgacgtgctgcatactcccgtgttcaagcattgtacaagaagtcgcgtacctcttgcgcacgaaccatcctcgctgggaaatggagagaagtcgcgcccagcgtggaactgcgcgaacaggtggcgtattggaagacacttttcgaacaagagagccaagaggacagccgtgagccaccagcagaaggtccacctgaatgggaaatcgtgaaccctgtaaccaaggacgaagtggcacgccatatgcggggtttgaaggacggcgcggcgggtccggacggtaaacttcgcaaggacttaaagggtttatccactggcgcccttgccgctcgctttaacctttggctgttggcaggaatggcgcccgacgcttttagagaaggtgtcacggttctcattccaaagtctaatgactcaaccttgccgcaagaccaccgccctatcacactggggccaattctgtgtcgtctttaccacagaattcttgcggagcgtgtggaacgtcattatcggattagcgaacgccagaaggccttccgccgcggagacggtttagcggagaattgttacatcctgagaacagtgatcgatgatcgaaaggcccgttgccaagccaccaacatcgcctttatcgacgtcagtaaggcatttgattctgtgagtcacgagagtattttcctggcagcagccagcgctggcataccagaccctttagtcgattatgttcggtcggtatatggtggtttacgtactcgtattcgagcaaacggggaacttagtgaagtaatcgcggtaaaccgtggagtacgccaaggcgacccgttatccccggtcctgtttaacgccgttatagacttagctctcagacacatagatccagagatcggggtcaaggtagactcggagcgtctgtcatgtttagctttcgcagacgatttagtcctgcttgcaagtacgccccaagggctccaaaagcaattttcaggagtcgagaaagcgttgtgccgctctggcttggctttaaacgttggcaagagtgcgacgttgagattagacgtccacggaaagcgtaaacggtgggcatgcaacccggtaggtttccttaagtgccgtaacggcggaacaatgcgtgctatgtcggtgacggacgggtacatgtacctcggaaataccgtctctgccggcgtggcgtctgagaaatctgtcctgattctcaaggcaggtatctcagaactcacccaggcccctctcaagccccagcaaagaatgtatatcttacgcaacaaccttatccctagtctgatgcacagtgccgttctcggctctatctccaagaaaagcctcaaattcttggatactatgaaccgtgccgcggttcgcagttggttgagattaccccgggataccccttttggatacttccacgccgatttcagagatggtggcttatcagtgactcctctgctgtggacggtgccgctgttacggacgaagcgcatgacaaagcttgtggcatcgcccgatcctgtagcgcgtgccgtcagtcgtttgcctattttcgcacgcgagagaaaccgttggtcccgccctctgagcgcatatggcttacctattcgagacgccgttggtatcaagcgcgctatggcagagggtcttcacactagcgttgacgggcggggcttaaatgggtccttcgcaagtggccacgttaacgcctggatgacaagtgggacggctcgtatgactggatcaggttatgttaattgtattcgcattaagggaaatttaccctacaccaaagcacgcgcagcccgcggtcgtccagagaagcccatccgttgcgacgcatgcaacgaggttgagtcattgggtcatatactccaacgatgctccagaacacaccagcctcgtaacgaccgccacgataagatcaacaaattccttacccaaagtcttaagaaattaggtttccacacacaagtggaaccgccgataccgacgcctcagggtgtccgctaccctgacctggtggcctggcgtgacggtagatgcgtcgtaatagacacgaccgttgttgcagacaacagaaatcctgacgaagcgcacgcgcgtaaggcgacctattatgacaccgcaggggtacgggagtggtgtgccgacaagtctggggttcccgctaaagacatttctatgtctgcatgtgccttgacttggcgcggtatcccgtctcaacgtagtgttcgagagctggctacttggggtatcactaagtcacactggcaggtcatgtccatccaagccctcgagggatccgtaaaatgttatgctcacttcttccattcgactagcggaacaagagcggtcccttacccatacgatgttccagattacgctctcgagcaccaccaccaccaccactga

SEQ ID NO: 380 - DNA, 3222 bp, synthetic construct
  source 1..3222: mol_type = other DNA
atgtaccccacctcggctgaagttccgcaaccatgtccagtatgtctctctagcctgattgatccaaagcagatccgagatcacttccgtaagaaacatcatggggtcctgatgcactggacatgccgcaagtgtggtagattctggccaaacaataaaagtgccgctagtcattaccgctattgtataaagagtctcccttcacttgagggtccatcaaagtcacataagtgtattgagtgcggcggcagcttcagtactctggccggactccagttacatcgcaagcgcaagcacccggaagcatacaacgagagtctgccccgccccacaggaaagaatcgcccttggggtgatgacgaacttaagcgtctcgcggcggtagaactggacagcggcggtactaaacatataaatattaaatgccaaaagcacctgcctcatcgcacaatcgaagccatagcctctattcgcaagaccgatcgataccgcattatccttcgtgagatacgtagcagccgtagtataagtcgagagactcgagaagaggcgactaccagcacgccggattcgagcaatgtactcgagcgcttaacgtctcgtattgcggaattgaaaagtggagactactctccaagtgttgaggctattctggcatacacagagagatgcttagaggatagaaatgcaagttccgggctgtctttactcccatctgaaatgtacatgccaaaaccaacttccgcatcaaagataaatcgcgggatgcgcaccccttttcgcccccaaaaccgtactcagagaagacgccaacactaccaacaagtccaactgttgtacaagcgagatcgcaaacaggctgcaggagtaatattagacgggtcccccttacatgtcgtccaaccagacgtggaaaaggtggacgaaattttccgctctcgattctcacgcccatccccgccggacgacgccgaattcatatcttcccccgcaggagttttaaacatggactacatcacggcgggtgagatccagcaatgccgtgattcaatgaagaagaacaatgctcccgggccggaccgtaacataacaatggacgtacttctggcgctggagcttccagtactggagttactcttcaatacgtggctcgcccttaaacaagtgccagcggctttcaagactgcccggacaattctcattcccaagtctggtgatacctctgacccgaacaactggcgcccgataactatctgctccttgatatctcgtctttacgcaaagctgttagcttcccggcttagtaaatgtgcaaatctgtctgagagacaaaaggcattccgccctgtagacggttgcggtgagaacaccgctatattgtctgcggtaatagcgcaggcacgcaagacgaagtcgcaattgcacgtagtgtttcttgacttggccaaggcattcgacaccattccgcacacctctattgtgcgggctctgaaacgaaaggcactgcccgggcattttatcgacgtcgtggagaacctttataccgaggcaactacttcaatctccgtcggtggtaagaacacgtcttctatgcccctcacttcgggcgtcaagcagggatgtcccttatctccgatactctttaatctcgtgctggacgaattaattactttgattggtgacgacaacggggtagacttgaatgacaagaagatagccatccttgctttcgccgacgacctggtcttactcagtcctacaacagacggtatggagactaacttgaagctctgcgaagggttctttgacaagagatccatgaagttgaacgctcgtaagagcgtgtcgctctcaatagtccgtgcacacaagcgcaaaaccatgctgacggatgagcgcccaaagtggaaggtacacggggaattcttgccaacaataaagcacacagaggagattaaatacctgggtgtgcgatattccgctgctggcagatctatcgctaagttccccaagcttgaccaatggctccaaagacttaagaaggccccgctgaagccccaacaacgcatccagatggtgcgttctacgatcacttcgcgactcatacacactttgcgattaagccgcgttcacgctaagctgctcaaggacctcgatcgtaaaatccgctcattcgtaaagtctgtgctccacctgccaagtgggacgtcgactgatttcttttatatcccggtgctcaagggtggcctcggtttgcaagaatttatgactctcataccagcagcgaagttaaaacttatcaactctatgaagaagagctctgaccaagcggtcatcgcagctatggaagtcgaccactggctgcgcgaagagagatggtgtcgcaaggttaccctgaaccaaggaaacaagaacgatgccgaacgccgccggcttgcgcgttacataaactcacctcggggtaaaagtcaggtcggcttcgcgaatcttcccggtcaatgtcgttggctcgaaggtggggcgaagctcacaggtcatgagtatattgtgggctgtcacctgatgtcaaacacccttcctgttcggacgcggacattccatggtggtcgggacagagtcgttacctgccgttactgcccaggcgttcttgagacgccgtctcatgctctgcaatcatgcccggttgtgcggaacgcggtgacgaagcgccacgacctcattctcacgaaattgcaacactttctcacgccaaattatgacagcgtaatccgtgagccttggttcaacggaagagagggtcgcatgaatccggacttagttctgaagcaaggtaagatggtatacgttgtcgatttgaccatcccctacgactcaagcccggagtttattgattcccaagcacaaagaaaggtagcgaagtatgatacactcaagccactgctccaacaaaagttccaagccgagcgagttgaggtgataggcctggctcttggagcacgaggtatgtacacaagcgccggcattcaaacctgtttgaagttaggactgagtgaccgtcaacgccgttatatgggtatgatggctttaagattgacgtgtgcggtatggggaatattccgttctcaacctagcgggctgttcaacaaggttcctgacacgggtactacctacccatacgatgttccagattacgctctcgagcaccaccaccaccaccactga

SEQ ID NO: 381 - DNA, 3222 bp, synthetic construct; identical to SEQ ID NO: 380
  source 1..3222: mol_type = other DNA

SEQ ID NO: 382 - DNA, 3861 bp, synthetic construct
  source 1..3861: mol_type = other DNA
atggacgcccatgtagacctcgcccttccatgtattcgcgtgtgttctccgaaatgtataaagccgctggcaacaactacacgtaacaaaacctcggtattatccgtcatggagcaagttccttcccgtgttgacagtgactcgctgcatggagcccagtctatcggtggggccgtccacagttgcgtggactgtgggcgtagcttcgacagcgttagaggactgaaacagcacgttaacagattttgtaagggcaaagccgctggatcatctgccgaagggagtgaggtgggtacggtcgcagaatccagcgccggtggagatgtgcaaaccagcacgactgagttgattcagtgtcctgcagttaccacatccaaaacgggcgagggctctgctacttgcagccagaagttggaacacgtacaaactccatcacgacagtctgcggatgactccgtggaagacctggatccgagaatgtgcgtccatgcgagcaccggcacgcattgtgagaagtgtcaatggtgcggtcggtgttggcttacgttgcaaagccttcgtcagcaccaaagacggacgcaccgagaagagtaccaaaccaaactgtgcgaggaacatcaattaaagaaggcgcggtggacaaaagaagaagaggtgcgtctggcggaaaccgaggtggaacttcgcaagtctggacaattccgtaacctgaatgtggaacttgcggaacgcttccctacccggacagtcgagtccataaaggcgagacgccatcgctcggagacatacatgcagctggttcaagaattgtccgagcactgcccgggtctgctggagatggcctctattcggggctctacgtcgacgataggcgagcagggcgacgctcatggagatgctccgagcgaggttgcaagtacggagcaagcggataactatgcggtactctgcgccgccagcgagttccctgaccaaaaccacgtttcatctgttcaaacgagtgcagtagttcaccatagtattcgggaagaaaacgagtttgacgatagtatcttcggaccagtcagcggcagcacggcagtgggcattggcgcggaaatgtctgagaagaaggataccacagcccaatcgccgtctgaactgagcgactggaagaacccaatttattactatatcgaggggcttcccgtggccacaacggttgacgacagtggcgagcgtctgttggatcgcgccttcgagatggaaaagggtgcccttacagacgtacgagatggtttaatcgatcgtcatgcgcagcagttcttatggatcacgcgtgacggtcagaagcgccaccaacgtaagggagatagccgtcgggagaaacgcgagtctcggaaatcacggcttggacaagacacgtcggccgctgagggcactggcggacctagccgtcgggcaaagcgcagacaactgtatgctcttttacagaagctttacgaaaaggatcgcaaccatgcggctgagctcgtcattaactcggagtggcaaggtttactggaaaagaaggtggtgaacaaggaagcgcaggtattgtattggaagcagttgttcgaacgccgctccgtaccggaccaacgcccatactcgactcaggttgttaagtgggatttattagaacctatcactgtggaagaggtacaaaagcaattactgcaggcaaaagaaaccgctccaggtcccgacggagtggagctggttgacctgcactcatatacggcgcgccacctttgcaaggccttcaatttgtggcttctgcgcgggagagtaccggaagcattaaccaagtctagaacggtccttattcccaagaagttaggtgcagaagatccgcgcgatttccggccaataacagtcagctccctgatcctgagaatctttcacaaagttttgatggaccgtctccagcgccatataagcatcaacccgagacaaaagggattcgtcccggtcgatggatgcttcgagaacctgtacttactggacgccattctgtggcgcgctaagcgctacttaagaccacttttcgtagcctttcttgacatcaagaaggctttcgactccgtcaaccacgatagtcttgttcgcgcactgaagaagaacggtatacctagtcccctgtgtgactatttgagtagtaatctgcgattgggtaaaacagagttacacgggcaacctgttgagatgcgtagaggggttaagcagggtgaccctgtaagcccgtttgagttcaatcttgttatggacgacgctgcttcgtatcttaaccagcacctcggcgttgagttcgatgacggagagcaattaacgcatggtttcttcgctgacgacacgtttatcgtggcgccatcgttggctgcacttcaacaacaattgacaaagttcgagtctgggctgcaggcgaatggtctggagctgaatgtggataagtgctattggttcggaattgaggtagacgggaaacataaacgttggttccaagacatgagaggggagctgaactttctcggtgagaaggtgactcgtatcagcccagcagatacatttaagtatttgggagttcacctgaatgttttcggaaagcgcatgtttgacccagcccgactggttacggcgcttcactccacaacatccgctcctctgaagccccagcagcgaatctatattttaaagaactatataatcccgcgttttctgcatcaactggtgctcggaaaggtttctcaacagttgcttgctagcgtagaccggattgtgcggaagttcgtccggcaatggattgcatttcccaccgacactccgttaggggtattctacgcccccgttagacacggtgggttaggacttccacagttgcagggcctcattccgaatctgagaatgatacgcttacaaagagttctgtcagctgagagcgatccgcttatcttgcacataagcgcggacactgagttcgcagacgatgtttacaaacgttgtgggtggccagctcgggttaaggggctgcgaataggttcgaagaaagagctcaatgattactgggtgaactctttgtatagctcggtagatggccgtggtctgcgagaggcgagcaatgtgccccaagtacatacttgggtggatgacgggagcaagatcctgtctggatcccaatacatacattggctgaaggtacgttacaacttggagccgacgcgttctcgcaaaagccggggccgcgaggagaatccgagagtttgtgataagggctgctgtgccgtagagacacttgcacacattgtacaatcttgccccgccacctggggaattcgtattcgtcggcacaacaccgtcctggccttgttagggcagtgtctttcacgaaagggttggaagatgaagcttgagcctcaaatccggtacagaagcaccacgttaaagcctgacttggtagcggcacgtgacggtcgcgcactggtagttgatgtccaagtagttgcagactccaccgaacacactctccacgcagcacactgtacaaaattacaaaagtacgacgtaccggaagtgttagagtacgcgcgtgaagtggcagggtccccgaccgccccagtggtggtcacttcatgcacaataaactggcgtggttgttggtcggagtcgctggcaggagctctcagacaagcaggcttgagctgggcacaagttcgcctgctggctctgcgggcccttcagggtactgcctcatgttacatcgggttctgccggaccgccggcgcttgctcatacccatacgatgttccagattacgctctcgagcaccaccaccaccaccactga

SEQ ID NO: 383 - DNA, 3717 bp, synthetic construct
  source 1..3717: mol_type = other DNA
atgaaaagacttgatcatcaaaatcgcccggtagcacgcttcagctgtgctggccaaaatgatgagcttgttcatcgtgcccgtaagaagtgcagccggtgtttaggccttacttccctgttctcagttcatctcgtgaccaagatgaacttgatgaatatgggaagcccacctggtgatgccctgcaggttaaatcggaaggactgggcacggcctcgggaataggtaacgggattgacggttgctgtccggtgtgtggaaagacgtataaggggtcgagaggtatgcgcatccattggcgtgctgtccatccggaatcgttccactctcgtgagacgacccgcctcgagagcgcggagagaaagactaagtgtcgctggagccaggaagaaacctctgcattagctcttcacgagagtcgcatcgtacgacgtggctgccctactggacgtcgtgatctgaacgaacagctggcgagactgatgtcgggtcggacctcggaagcaataaagtctcaccggagagcggagtcataccgtgagttagtcgccgcatatgaacgcatgggctcagttccgcgtacacgtgagctgccacgtgagacagtcgagaaggcagatgcgtcacggcgtgtgttacgtcctcgcgcgccgcgcggtagagacgaggtagagcaagtctcatctgatgcggttacacgcgttgccgaagcctgttcccctggtcctcacccgggtccgtatggtggcaataaacgtgagtgggacgaccatgcctcaactcagccggctacccgcgttgctgaagcaggtcacctcggtccctaccccagtgtgggagaagaatcgagcggcgagggagctgacagaacgcaacgcgttcgtgcaacacttgtggctgagctggatccagagtggctgccttcgggttccgacagcgagcccgggtccgaccgggaacaacaaaccgagtatcttgttacaatgggcgaattgccatccacccgggacgtgggcacacctgcaagaggccgccacccctcatacaccgaggtgaacggagacgagtttgattggcaatatccactgattgaggcgatacttgagcaggcacttagtgccgacatagaccctattttggttcaggtagctattgagaattctcccgaaaattcggactcgttacaacgcttaattgatcacgacttaatgggtatgtttccgcccattgagaaaccaagcttacgcggcggacctggtccccctagaagagccgcccaaaccgcgcgggccaagcgtcgtgagtcctatgcccgcattcaaagcttatacaagtcatcgcggagtaactgtgcgcgtacggtgctgaacggccattggcgcacggcgcccccaaagttatcaatgcaaacacagatggccttctggcgtcctctcctcgaaacaccgagtaagcaagaaacgcgtttaccacccgaaggggtacgcccacaatgggccatggtttgtccgataacattagaagaggttgctcgccatttagggaatatgaaggacggtgctgctggccccgacaactgcggccgtaaggacttacgtaagttaagcgcagtgtctttagcctgtcgtttcaatttgtggttgctgactgggaaggctcctgaggcttttaagcacggcattacagttttaatcccgaagtcccaggacggacacgagcctaaggacttccgtcccataactatgggtagcattttgtgccgcctttaccacaaaatactggccgagagagtggaacgtcattatcaaatcagcggtagccaaaaggcgttccgaaaaggagatggtttggccgagaacatgtatatacttactaacgtgattgaggaccgcaaggcaagatcccaggcgaccaatatagccttcttggatgtttcaaaggcttttgattcagtctcacatgaatcgattttattggcagccgcgagcgctggcatcccacacccgttagttcgctacgtccgttcggtgtacaccggatctactacccggctccgtgttgacggcgagttagggcccgacatacgtgttcggcgaggggtacgtcaaggcgaccctctgtcacctgtattattcaattctgtcgttgacttagcactgagacaaatcgaccaagaaatcggcgtatcagtggcaacagagaagttgagctgcctggcgtttgcggacgatctggtccttttagcgaccacaccgcgcggtttacaaacacagttcgagcgaattgagttggctcttggtgagtctgggctggacctgaatgcggccaagagcgccaccattcgtattgacgtttcaggcaaatccaagagatggatctgcaatccgacggcatttctgctggctaaggacgggcaagtgattaaggcaataaaagttaccgaagactaccgttaccttggtaacgcaattggaacctctcgcacgaagggatcgacagttcaagagctgcagcggggcatcgcagaattaagccgtgctcctttgaagccgcaacaacgcctgttcattctgcggaagaatctgataccgagcctttatcacacagccgtactgggccgcatgtataagaaatccttgaagtttctggaccaaattgtccgggcagcggtacgatcttggctgcgccttccaaatgacaccccattaggcttattccacgctcactatagtgacggcggcttagacatacccccgcttcttctgacagtaccacttttgcgtaccaagcgaatgggtcgtctggtatcaagtcaggaccctatagctcgtgccgtagcacaactgcccatatttgagcgcgagcgtaagagatggtcggctccactggcagcatacggagtctcgatccgcgacgggacaggcgtcagaaaggccatgggcgtaggactgcacatgtctgtggacggtcggggcttgaccgggagtcgtgaaacaggattcgtcaataagtggatggtatctggcgatgcccttatgtcagggcattctttcgttaactgcgttcgcttaaaatgtaatttgccgtatactcgcgccagagctgcgcgcggacgccccgacaaaccagtagcttgtgacgcctgccggagtcctgagactttggcacacattctccagtcttgtccgcggacgagcaaacctcgagtagaccggcatgatcgggcgaataaatacctgacagaggtggtaagacgttccggattcgccacccgggttgagcctgccatcccgacaccagctggtattcggtacccggatctggtcgtatggaaggacggtttgtgtgtagtcgtagacactacaatcgtggctgaccacaagaaccccgacgatgcccacgagcgtaaggtccgctactacgaccaacccgcgattcgtgggtggtgcgaaagtataagcggagtagcggcggatgaagtgaagttttcagcctgtgttctgacttggagaggtgtaccatctgtacggtcagtgcgtgagcttcgtacattgggagttactaagagcaactggttacttcttagcgttaaggcattagagggtggcattgcctgctatagccacttcaccaacgcaaccgtctcattctgttatctcccttacccatacgatgttccagattacgctctcgagcaccaccaccaccaccactga

SEQ ID NO: 384 - DNA, 3225 bp, synthetic construct
  source 1..3225: mol_type = other DNA
atgactggtgaggatcctcaagagtgcgcgaagtgtaattacaacatgatagacacaaagcaggccgttgaccattgcgcccgcaagcatcatggaatgtctgtccagtggaagtgtcggaagtgtgagagagattggtctaacataagatccatcgccgcgcattaccgccactgcacgggacggccgccctctccggtcgcaaccactgcgacgtcacacgtttgtgatcagtgcgagcgtgcttttacagggttggcgggcttgcagctgcatcggaaacgcaagcatccagcagcatacaacgagagtttacctcggcctacaggcaagaatcgacttctgggagccgatgaattgacccggttggccggcgtggagttggacttgggtacgtccaagcgtataaacttagtgtgtcatgaccatttccaacatcggtccgtagatgccattgctacaattcggaagtcaaagcgttacaaagacatcttaaaggtggtggtagaaacccgtagcctggttgatgagcaggaagcaggtgaaggcgcccaagctcctgagccctttataaacatcgtggaagcacaattacgaacgcgattcgatgagctcgaaggagattctagccccgccgtacgtgacaccctcgcgtacacccgtacttccctggctgagggtaacgccacgattggccttgacctgctgtccgaggaagtctaccgcccgcgcaaggcaccggattcaacctcaaatcccagaaaacggggacctgactttgcgcccactacccgcagccagaagcgtcgacagttgtataagcaaatccaatcactctaccaaagaaatcgcaagcaagcggttggggtgattctcgacggagatcccattcagactgtattccccgacgtggaccgtgcagacgaggttttccgtggtcggtttgcgcgcccctctccacctgacgataaagttttcaacctggttcctggtgacacgatgaacatgggctacataacctcagaagaaatatccaaatgtcggtctgcgatgaagaagaagaatgcacctgggccggataaagaggttactatggacctcgtattgggattagaacttaccgtccttgagctgatctttaacacgtggttcgcgttaggccaggtaccaactgcgttcaaagaagctagaacaatcctgcttcccaagtcgggtgatgcaacagacccaaacaactggcgcccgatcactatatgctccctgatcggtcggctttatgcaaaattactcgccgggcgtttatcaaagtgtgccaacttgagcgaacgtcagaaagcgtttgtaccggtggacggatgtggtgagaatacagctttgctttccagcgtaattgctcatgcgcacaaggtaaagacacaagtgcacatcgcattcttggatttagcgaaagcgtttgacacggtgccgcatacctcgatcttgagagcccttcggcgtaaagccctgccagaacatttcatcgcgatagttgagaacttatactctgatgcgaatactagtatttcagttggcgataagtctacgccatcaatccctatgacttcgggtgttaagcagggctgcccgctcagcccagttctcttcaacctcgtgcttgacgagcttattcagaacattggcacaatcgacgggctttcggttggtcattccaagttagcgattttggccttcgccgacgacttagttcttatcagcgggaccaaagatggattggcatccaacttacggacgtgcgaggaactgttcaatgcacgctcgatgaaattaaacgcccgcaaaagtatgactttatcgttagtccgcgcgcacaaacgtaagacgatgctcactgacgagactcctcattggaaagtgtatggagaatttctgcccgcggtaaagcacacggaagaggtgaagtacctgggcgttcgttacaccgcaggcggccgtccgatggctaagctgcccaaactcaacgactggcttcagaaactgaagagtgcacctcttaaacctcaacagcgtatacaaatagtccgatcaactataacctcacgcgtcatacatacactcagactgtgcagagtccacgccaagctgttaaagaacctcgacagaaagattcggactttcattaagggagtgctgcatctgccttccggtacatccactgattggttctacattccaatacggatgggtggccttgggctgcaggaattcatgagtttaatccctgccgccaagctgaagttgatcgacgggatgaagaagtctcaagacccaaccgtagtggatgcgatccgacaagagcattggctgaaggaagaacgatggtgcagagcagtcagcagcctgtacggaaacaaggagcaagcggaccgaggtagagtcgagcggcacatatcctcacacacgggtcaaacccaaattggcttcgctcgattgccaggacaatgcaactggctggaaggtggtggtaagatgacaggacgtgattatattgtggggtgccatatgatgtctaatactctgagtgtccgcactcgcacgtttcacggtggtgttaacagagtgacaacttgccgttactgcccgggagtgccagagacaccgagtcacgcacttcaaagttgtagcaaagtgcgggacgcggtgacagcacgacataactcgctgctgaccaagattcaacattttctgacaccgaactttgattctgttatccgcgaaccgtggttcaacggagtagaaggccggatgaacccggatctggttctgatccagggacggttgctctacgttgtggacctgaccgttccttacgactccaccattcgtttcatggactcacaagcccaacgtaatgttgataagtaccaagtgttggagcctctcctgcgtacgaaattccaagttgagcgtgtaaaagtattgggtcttgctgtaggggcgcgtggcttatacactcaaacgggtgttgacatttgggcgactcttgggttgacagaacgccaacgccgttgcgtaagtgcgatggctcttaagcagtcctgcttgatctggggtcttttcaccgggaatcgacagcctcaaccgacactcgacacaggcacttccgccgcggagtacccatacgatgttccagattacgctctcgagcaccaccaccaccaccactga

SEQ ID NO: 385 - DNA, 3576 bp, synthetic construct
  source 1..3576: mol_type = other DNA
atgggttctgccacgttatactgggatatcgggatcgcattgccgaccaaaacgaataagaaggtcgctcgggttagcttgacgcgtaatgcgcactctgaatctaataaaatctccgactcgaatccgtcttccacaatttatcaaattgactaccctattgagtccgagtcgtgttctttatgtcatgaagacctgccgaacttaaacctgaaaatccgtgagcatataaacgatgcccacgggattgtgacaatacgctacaagtgtcggaactgcggcaaagagtacgacacgataagttctatcaagtctcattacccggcctgcaaaagaaagcaaacaaacaacaacctggccgcagccgttgcgaagcctgcgagcacaaatccacaattccctgtgacacaccaaaatatccctaatattccacccctgcaatgtgtggagtgtcactcaaagtccagttcgttcacggccaaagaccgtaaaggactcatcacgcacatgcgcaccaagcacccgcaggcgtatgaggagtcaaagaaggtcgccaacatacgcatagcatggagcaatgacgaggacaacattttggcgaacctcgagatcagccttaagagtacccaaaagggtcagattcttgagcggctgttcaacgagtggaacaagttggtagttcaatcgcacgccaattaccgctcaaaggatgctatccgtgcgcgccggcaacaacaagagtataaagccatcctgcgcgacttaatacaaaagcaagacgacacgaatgctagtagtgacgacaacgactcaagtacagacagtgactcacctagtatccccgcgacgatctgtaatgacatgaacgccattcacaagttactgaatgatattgtaatcgcagggcacattaagctcagtgaccacatgaagaacgcaatcgacgctttcttgaaccccaacaaagctatagaccccgtaaaattaacgatgagtggtatcaaccaatccataaccgacataagaaataagaacaacaataaccgtaattcatcacgtgtgaacggtaccgctaccgctattaacaagaagccggcccgcaacaagagccgtatcgaaaagagtaagcaacatgcctactatcagcggctgtacctgaagaacaaatcgcgtctcatggacgagattatcgacggcgtagcgccgaatgttgatcccccgccaattcacaccgctatacaatattacgagcagatttggtcgatcctggtgcaagatacgcatcccgttactactaagccggacttcaacaacaaagacaataccctcttatccccgataactaaggttgagattcagtgggcaattaagaagacgaagcgggactcagcaaagggtgtagaccaaataacactccaagaggctaagctgctggcggaagacgatttgtacatagcatttaacatatggttgggctgcaagacgattccaagcgaccttaaactcaatcgcaccaccctgatccctaaggggaagcaaggtcttgatatgataactaattggcgtccaatcacgatttccagtattctgctgagactgtttaacaagatcatagcctgcagaatgaataagtacttcgagattgataaacgtcaacttggattccggcctattaacggatgtagcatgaacatcctgtggctgcatcatttgcttaagcacgcgcgactcaaccgccgtgatttatacgtgtgtcttatcgacgtagcaaaggcatttgactccgtgcctcacgagagcatcttccgggccctggttagacatcatgccccgtcgtcattcgtagagcttgtgcgtaaccaatatgcagatagttatacctcgatcacgtacaagaatcttagctctaagcggattaagatactccgaggtgtaaagcagggcgatagtctttctcctctgctgtttaaccttgtaacggatgagttattcggcatactgaaggaccaactcggttataatataacaaacattggatcctcaaacatcaagtgtttcgccgatgacatttgtctgatatctggttcccgtattggtatgggacacatgatcagcgagacggtgtcattcttaaacgatcgcaacctgcaagtgaacgccaacaagtgcatgtccattggactccagaaaggatttaagggtaagaagtctaagattgtgacagagccaattttcacaataaacggcagcctgatacctattctgggccacgtcgagaatcatacaaaatacctcggaatccaattcacatcagtagggatggtaaacgcgaacgtcgccaaagaccgaattattatggtactgaacaagctgcagaagatcccgctcaaaccccaacagaagatcgacttgattcgtagtcatgtgattcccctgtttatttatcaactgatcaatctcgagaactacccaaaattacttaaggaaatcgatatcctgataagaagagcgatcagaagcatcctgcacctgaatataggcttaagtattgagttcttttacctgcccatacgtgacggcggcttgcaaattcctctgttgcgtgatatcgtgggcctggctaaggttagaatctataagtacatcatgcggtccgacgatgaattactgaaacaccttgtccagaagcaagcgttccctatactccatcgtttcattaatgagttaaaattggactcctcgtatgagactagcgacattaagcttcgaaagattcaactcgtgaaggaccgccgggtatcctacgcgggcaaggttcatgggtatggatccgaagttttctccacctgcccaagcactaacttctggctgtacggggataacaaaacagttaccgggcgtacttacattaacggcatcaagctgcggactaacacacttgagactcgagttaccgtgaccagaggctgtatggttgacaagacctgccgcatgtgtaaggaagaaaacgaatcattgatgcacatccttcagttctgtaagacaactaagggtttgagatacgccagacacaacagcgtttgcgcccgagtggtgaagaaactcaaagaaagaggctttcaagtatacgtcgagcaagcttacactaccgatgagacgggcctgcccaccttactccggccggacatcatcgccgtgaagttagatcacgcttacgtactggacgtgcaggccgtctacgaaagcagtggagctagtttcattaacgcctacaagttcaaggtggacaagtatacccccttaattcaagccatcaagaaccgccataagtgtaaagatgtaactattcacggtctgattattgggtcacgtgcgtccttccaccacggtcatattcggatctggaacgaattcggatttagcagctcggagttaaagtatatggctctcaattgtcttgaaaattctttacgcatttggtctacgttcaacttcaaccgcttaaacagcttcaaccgttcttacccatacgatgttccagattacgctctcgagcaccaccaccaccaccactga

SEQ ID NO: 386 - DNA, 3540 bp, synthetic construct
  source 1..3540: mol_type = other DNA
atggattacaatatacttatgcgctacgaggggcgagaatgcattcggtgcgaatgtggagtcgtgtgtaccacgcaagctacaattaaagagcactgggcttcggttcacagagtgtgcggtttagtgctcgtatgcgacaaatgcaataaacgattcgtgactcttcttgcggtatcttgccacttttgtaagtgcgatgcggtcgaggtcgaatctgtgggtccggaagaatgtaacctctgtggcagatggtttacacaaggacgttcgatgtcggcacaccaatggaaggcacacccgctgcagtggcgggcccgaaagggcaaagcggaacgaaagcgacgtcttgacttagttgaggaagaagacgagaatgtaggtcgtccatacggacaagaacgcaagcgtgcacgtgtcgatgaagacgagaacgctggacacccgataggagagcacgttgaggtagccgggattacgcccggcaacggggaagcaataggcgtagaagttgtctttccggacacgcaagagcgtgttcaaatgggagttgacgaggatgacaatacgagacaccctgtctcagagatagaagagggtgccgggattaacccaggtaacggtgaggaagtagatgtggatgccattcacagtgacagccaggagcaaatgcgggttgacgaagacgagaatgctggccacccggtttcagagaatgaggaagttgttggaaacgcgcctgataatggggagttagaggtagccggggttacgcccggtaacggggatttagttgatgttcacctcgtttcgcaagctgcaggaatcgatgaagcagtcgggtctgggttacacgttggggctggtattgctccgtcagaaagtgtcgaagcgttccgtgcagcactccgttcgttagtcgtggaaggtggtcttagcggtctggttcgcgacgccgttgttaacgtcttgaacgacgagggcggcgagagaattgggtccgtgttaaaggatctggttcaagcaattgggttggaaaatgcaacgactccaggcacagcgcgcagaccggggcaccgcggtgggttcggccgtcatcgacatgtgggcaacaaggccgcttcaatgtatgctggtttccaggccatgatgactcggaatccttcggaagtggcacgttggctttgggaaggccgtgctggtgaagaagggaacgtagtgccaccaatggatcatttagttcgcattttcggaagtgtgatgtcagtcgacggggtcgaagataacgagcaaatcgcctcgtgccaagaaggggtaaaggttttctaccctgtgacttcacaggatctcgataaagccttgaacaaggctaacgctagcgctcccggccttgacggtttgcgcatcgaatccttaaagcgtatgtcaggtgataacaagtcaaacgctgtagcccttgtaaatctggcattgcttgccttcgggaactatgaacgtactgtgcgcacagtaatgataccaaagtctaccgagcacctggaagacgccgacaattggcgtccaatcgccattgccagccacatcattagagtgggtcatcgagttcttgctcatcgtctggaatctcaagtaaagctgcatccggcccagcggggtttcactcgaggagacggacttgctcggaatgtatggcttctggacgctataataaaacacgcgcgtgtcaacaatcgcactctttgcgtagtaagcctggacattaagaaggctttcccttcggtttcacactcttccattgcgagagccgtcgaccggttcggttgcagccccgttttctgtgagtacatacgatccgtctaccgcgataacgcgacagtgcttcagtgtggcaagtcggtttccgacgcaattctggtgaagcgtggcgtgcgtcaaggtgatccaatgtcatcggtcctgtttaacatggtaatggacgagctgttgtgtttgttagaccccgcccttggctacaaattcgatggtacctgcgtcaaggccatggcgtacgcggatgacctggtgttggttgcaagaagcgtcggcgctatgaagaaacttctcacaggtacggaagagttcctgcttaaacgcggccttatgcttaatgaaaagaaaagcgttgcactccacctgagacggggcaaaagagcggtggtcctctctttagaggaagtctggagcttgcgtgagggcgccattggtatggtttcggagatcaagagccttacctatttgggcgtccgtttcggtccttatggaaagatgaactatgataccaaacctctgtctgatgcattggggcggctctgtcgcgcaccgttgaaacctgaccagaagctccttctgttgaagactcatctccttcctaaagctcttcactcacttacccttggttgttgtgataagaaacttctgaaaaccttagatatgcgtgttcagcacgcagtacgttctattctccatattaagaaggatgtaccatgtgcttttatacacggccctagtaagcacggcggcctgggcgtcatgtccttcgtcgcagacgtcccacgtcatgtgtgtaatcgcatagaaggtgtgcaactcgcaggtgaaggcggggagatgcgcgctctcgttgactcattttacttcgagagcattcttcgtaagttgcgtacgccggcgactcaagtacctgacgaatatgttgcgcatctttctcgaaagaactgccgtcgtaacatgtcagttcgcctgaagcaagctgacatgtcgtccaagtacgacacgagaggaatcactgaggtagcagaacacggtgatagtcgcgcttggttagcgtccaagccggttttctggcctgcgcgaacttacgtaaacgccgtccaatggcgatgtctgtcgataacttgccgttcgcgcgtgtcacacgggcgcgccggcgaccgtctgtgtcgaacagggtgcggcaaaattgagacggcttttcacatctctcaggtctgcccatcaacgcatttagcgagagtggcacgtcacgatcggatcgtccaattaataaagcgttccgcggagtccaaaggtcacgccgtggtggtagagccgcggataactaccgcagcaggtatccgaaaaccagacctcgtgatagcgaatgctagatctaaaacagtattcgtcgttgacgtgcatgtagcgtggaaaggtctgcgccaagcatttgacgctaaggtaaagaagtacgggagacataaggaaatttcagacttcggccgaacactgcttcccgaggcagagcgtgtccaattcggtgctatagttgttagtccccgggttatatgggcaggtgcaaacgagcaagtagtgaatggtttgcaactgccgcatggtattcgaaaggtcgtgcttgcttcctgcgtggaaggtaccatgaaaatcctttccgctttcaacgccgtccagtacccatacgatgttccagattacgctctcgagcaccaccaccaccaccactga

SEQ ID NO: 387 - DNA, 3615 bp, synthetic construct
  source 1..3615: mol_type = other DNA
atgacatcctcacagtcatgttcccaaccagtatgtagtagatcgaaaccgtcagacacgaccgtgttatctgactttcaatcgcaacctaccagaaagcgtgcttcggcaaaacaaaaggacagccagtcgtcggaaactcgaagctgtgtttcaaagaaagacaccaccctttggaacgatgacctcgtttcacaattactcgaaataagaaagatggtggtccctgaccctaattgtaaagtggctccatacgggagttggaaacgaattcatcagatttggaaggaacgtaagctcccaaacatgacagagcaacaattgcgccaaaagtggacgcaattaaatcggaagaagaacgttgacaaacttgtaaaccagacagaagagatgaattctgaggtacataatctggatgaaaacgagaaaatccggatgagcgacttgtataagaagctggaaccacttattatcgacccgaataacttcacgctccccatcgaatctcgtacctcaacacgtatgaagcgaataccttcttctagcgatttaaaggttcttaacctgctgtttagtgacttgtacccacgcatcgagaacctgtttcatgacaagctgctcgctatcgacacccttctttacacgatagtacacaagtataagtcaataaaagaaccaatgcaacaggcaatctacgacaagaaggaacaggaccttatcaacgctataaagaacatcacgcgtaagctccgccctctctatgctgcgatgcatcgcatgcgcaacggtgttaaagagacgtcacaaaagatcgtccaacaaatcgttgaagaatacaagacgttcgatcttaagtctttaacaacgaagatcgggatgatgaaacaagaacgtaatagatacaagcgtattctgtcggagtacaagaagcggaagaaattctttcggacgaacgagatgtttatggtaaatgagaagaagttctactcaatgatagaaaaccgcaataagaccaaacgggagacgccggacgagaaagaggttgtgcaattctggtccagtatatgggagcgtaagaagagttgcaacctcgatactgcttggatcaaggagataagcaagaagcttgaggagaagctttcacttgtagacaaagagaacacccgaaattcccggaagctcaagactaagacggccaacaatctgaagcaggttaactctattttcaacttaaatatatcacacatcttcaaatccatccataagaagaagaactggtctgctcccgggcccgacatgatttgtaactactggtggaagtatattgactccacgtggcccaagctcctcgaggcatttcaacagatgttgaataacacggtaccgatacctgaatggttctgcgcgggcgttacatacagaattccaaagcaaggcccgccgtgcgaggccaacattcgtcccataacatgcctgaacacggtgtacaagatgttcacgtccatagttctttcctacctgtctgcttacctggatcaacacaaccttatgacaatagagcaacgcggtgccaagaaaggtgtctggggtacctatgaaaacttgttaattgatgagataatatcccaggatgctaataagcaccgcaacaagagcttttcggccgcatggctggacattacgaaggcttacgactcgattccgcacgagtggattatgaaatgccttgaaatccacaaggtcccaaatgaaatcaaagccgttatccgtcaactgatggagaagtggtccacgcgcatttactacgactttcagaagaagacacgtactatccaaataaagaacggcatctttcagggtgattctctctgtccattcttattctgtcttgcactcaacccaattagcattcttattaaaagctggaactgtggatacaagctgaacagcgcggatatggttattactcacagtatgtttattgacgatatcaagttgtatagtaccacccaggataagatgaatggtattcttagtttgcttaagagcgccctgtctgacataggccttagtatcaatgacaagaagtctggtactctgataagatgcaaagggatgattagtgaacaaggagtcaagctccaagatggtacatcgttcccggcgataacgaagactaacttataccgatacttaggtttcatgcaaagtttaggcatcgacaaggagaagaataaggaaatggttatcaacgagttcaaagagagagttgagcgtctggtgaattcttccctgtcgggatttcacctggcacgcgcttacaatacttattgcattgggtatctccggtacttcttctttatgaaatggaattactacgaactgaaccgcatggagcagatattaaagaagagcctgaaacagaaaggcttgttcttccgtggattcccggttgccttattccacttgcccagagacaaaggcggccgcgggtttcagtcagtgtttatggaatatctcatctatcgcataggacttgcctttaagttccacaaaagtccgcacatggagagaataaccaacttactgcgagataaggactgcgactcattttacaatgatactctgacttacggtaaagagttcggcctgcaatttgagttccagaagaatcagaatatcatcataaaagactctgaaaccaaggaagagctcaacatatcaagtaagaagaaactcactcaactgttacgagacagagcgaacaagaagtggttgaccgaggcagaggaaggtggtatgcacttcaaattttggaacatgtataaagagcgtttatcttggatcaagaattggcggttcattaccaagcaatgcgagaatatgttatggatggcgatgacggcaaacttacagacacgttctctgacgaaatggtacaatacacagcattcgaatggactgaagcaacaaaacaacataaaatgccgattgtgcggcaaagctaacgagacgaccgaacatattgtgagcggatgctctgcgttgatgaactcagatatcattccacgacataactcagtactgtaccacctgttacgtatgatcttagaccgtaacggaatccaacacaacggtaccgtgcagatggagtacagcactgacaaggtgcgaatccaatgcaattgcaaaatcttgaccattcgcgaggttgagcacaacgtcccagacctggtggtgtatctccacgagcgtaaacaaatacagattatcgacattgcagtaccatatgacgacaatctggagatgagatataacgaaaagatacaaaagtatggcccgcttcagatagagttacaaaagcttaatcctggctataaggccacagtcatcccgatcgtaataggagccttcggagtaacactgccaagttttcaggagaacctgaagaaagttttaggggagaactgcttatacgaggctaagaagttgatacgggcggctatctcaggcaccttcctgatcttgacgaagtgggagagtcgtgcaaagatcgtggactacccatacgatgttccagattacgctctcgagcaccaccaccaccaccactga

SEQ ID NO: 388 - DNA, 3150 bp, synthetic construct
  source 1..3150: mol_type = other DNA
atgtcaaaccctaataaggtaaagaaaataacacacagattttgggcccataagttcaagcgcaaaggcaagggcaagacgaagaccaataagatgtcaaatttaccacgccctaacttctcaatagaggagctgaagaaggtgcttgcgcggaagaagttagacacggcgccaggcccagacgctattccctattccgcgtaccgcacactgaatgaagacaacttgtcggccatcctggaagagattaactcgaaaattaacgacacgccagaggagtggctcgaggctcttcagtggaacatattcaaggaaggtaagaaggaagaactcaacaactacagaccgatcgccttatgcaacacaatttacaagattcaaacgttattgattaaggaacgcatggaagagattacgactgaagagaatctgattcacccgagccagcacggtttcaccaagcaccgcacaacatcccacaacataattgccctgaagacgataatccacaaggataagttggaacagcgggagacgcacttactgttcctcgacatcgcgggtgcctatgattccgtgccgcacgaggccctgtggtgtacgcttgcgaagaacccatcgattcaaccctacgctatgatcatccagcaaatgtactcaaaggctactacacaaatcattacttcggttggattaacagacaaaatccaaatcgaacgcggagtgcgacaaggggaccccttatctccgctccttttcaacctctttattaatgaggttattacgaaagtttacaaacaacatcggggctggcgtaccaagaaccagaactaccccaccttagctttcgcggatgacctggtactctgcgcaaacacccgccgcgatcttcagacgatcactaagaaggtcatacgtttcttacgcaagaatcatatgaacataaacacaaagaagactatctacacatcctctaatcgtcgtcgccgatcaattcacttacaacacaacacaaagataaaggaagttaagaaagggaaagcagttcgctacttgggtgcttacctgtctcttgaccagccggacaagaaagaaagcgacacacgcattgccgagttatggaagcgcgttaacctgataacatcaaagaaactgtacccgcacattatggcagaggccgtgaacgcgttagcgtatagcaaaattgtttactccttcggccataccaagtacaagcgaaaggctttgaaagagattgacaagaaagtcgcgcatctgatccgcacgaaaaccggggcttacccatttcacacggataaagtccatgcaaaatggcgtgagggcggatggggcttgctgtcgctccacgatctttacacacgcatgatgacaggtactttgttcgatcggatactgaaccggccgaatacaatttctaagaagattatatgtgaggcgctcgaggagattggggagtctaacaaggagattccaggaagtatcacatatcaagcgttacacgcgccgccaacgattaagcaagcttggaagatcgctcgggaagagggtttgattccgatcaacacgacgttgaatctgctccacccagaaaccatacttagcgcccacccactggttattgatgagcttaaccaaaagggaatctccgacgtaactactattaaaacgaaccttccgcagtcagttgccaattatctgctgggtccgataaacaacctgcttccgtttatgcgtcgcgaccaagagatgcagccgcctcaaaacacaatacaaatcgaaaacagccgggttgtgtggacagacggctctctgaagaaaggggagaactcaggtacagctggaatattttatgatctgggaaacccgggtaataagaccatccacatcccccattgcaattcttcttttgaggcggaagcgattgctatacacgcagccttgcgggagtgtcctcaagaagaaaacatacgtataattactgactccttgtctgttatccaagcgattaatagcgaggatagcccatcttatgtgatagagggcatcaagaaacggatacaggaacgcaagggtaagcaatcgcggactgagattattcacatttatagtcacatcaagaagaagaagaagaagtcacaggtctgggaagagaagatacgagatcaagagatagaattgttcccccatttccgccagtatcgctggggaaataagaaggccgataagctcaccaaccaagaggctagcaagcagaaaggaataccaccatacgctccagagttcatgatatttaataagcagaagcttaagtgggaacctcttcgcgtcaaagacacgctcaaacgggaacagcgttctaagattattactactaccaacgagcgtgatcaaggccgacaccccagcctgcaacaaaccaaccgttctctgagcgagatcgccttgaagaacccgaccatccaagccagtgaagcgaactttcttatcaaggcgcgaagttactgtttacccattccagaccgtaagaataaaccggctatttgtccaaaatgcggcggtcttgagacacatcagcaccttttattagagtgtccaaaccttgaggaaactaagaagcaaattgttaagaagatgaaggagacactgactaaaatggcgattccgcatatcgtagccaatgaatggttcaataacgagattcctacctacatgtgggccttgggttatattcctaagaagtgggcccaacgcatgaagcgtatgattggtggtaagcctctgacatcagcgatcgcgattgcaacacgtatcaccagcaaattgactttaaagtccttcaaggagaatcgtaaccaaatacgtagaccgaaccggcgtgcgaatcaaagaaacactaacccgacacgtaatgacaccgacaacgcatccgataacgacaacacccaagtcgccaacgctaccaacgtaaatgttgccctgcaaatcgacattcgtcaggccatacttgatgcgttggagatcttacctgatccgataatacctactacaccatctttacaccgtacaacaccccaatacccatacgatgttccagattacgctctcgagcaccaccaccaccaccactga

SEQ ID NO: 389 - DNA, 2919 bp, synthetic construct
  source 1..2919: mol_type = other DNA
atggcagctaatctggttacaatctcttataatcttcacggctataatcaagggtgccccggtataaacgagcttatcttgaagctgcgcccagatattttcatggtgcaggagcactggttaagtcctgataatttgagtaaattagacaatatttcagattgttactttgtgttcggatcgtccgccatgcttgactgcgttagtagcgggccattggtgggacgcccttttggtggaactgctttcttaatcaataagaagcacgtgagcgccacctctaacgttgaatcatccgatcgcttcactgtcatccggatctacaactggctgcttataaacgtttaccttccttgtgtcgggacccctcaccgagacgaactgtattcagacattctcttacaattgcaaaacattattagtgccaatagtgattgttcgtgtttgataggtggagatttcaacgtggacttagacgggaactccaatatatcattattagtcaatgagtttatgtgccacaacaatatgcatcggtgcgacgtgctgttcccagtttctaaccggaacacatttatgaacgaggccaccaatacgggaagtgctatcgattatatgctttcctcaacgagcgacaaaacgattgcgttcaacatactggacctggacatcaacttatcagatcattcaccgattatggccgtgtgcgccctggacatgtcatttcttcccctctcaactcaatgcgagtcatgtagcccggatgatgtcacgcatcttagatgggaccacgcacctttatgtatgtactacgagcatacccggctgcttttgcaaccggtccttacgaatctcgacgctctcctcgaaagctcagacagcgccgacgatgtgttctgtgttgggtctgcggaccagatttactgcaacgtggtaaatatcctttgtgaatcggcgaatctcttcgtaccgaagcacaagaagaacttttaccgcttctggtggagtcaggagctcgacatgttaaagagcaaggcgatagagtccagccgtgcgtggaagggtgcaggaaagccaaagcacgggtccatcttctctcaatacaagcaagataaacttctgtacaagaagagaattcgagaggagtgctttaacgagacaaaatcctacacgaacgatctccacgacgcattactgtgtaagtctgggcaagcattttggaagacctggaaatcgaagttcgaaagtaagtccaccaacgtgcttcaagtagatggaactgcggacagtggcattataacggacaagttcggtaagtactttgaggctaactgcagcccctttagccccgcgagaaacgaagagttcaagaagaaatacaccgaattgcgcagtaactactctggttcccccattaccgatgatcaagtgtttgacgtggagctcatttcacgcttagtgtcaaatatggacaagggcaaggcagccggattggacgagctgtcatcagagcatttaaaatttagccaccctatcctcatctgcatcttgactaagcttttcaaccttttcatagctaaagggcacattccgactagcttcggcagctcatatacggttcccatcccgaaatgcgacggtcgcacgcgcgcgctgtcagttgatgacttccgtggtatcagtatatctccggtattgtcaaagctgtttgagcttgctattcttgaccgcttctctacttactttacaacgtcagaccatcaattcggtttcaagaagcacctttcgtgccgtaacgcaatctactgcgtacggaatgttgtcgagtcattcgtctccaacggttcaaccgtaaacgtgtgtgcgcttgacttgagcaaggctttcgatcggatgaaccattacgctttatttatcaagctgatagagcgtaactttcccacaaagctgctgaatgttctggaaacctggttttgcgcctcaatcacatgtgtaaagtggggccggaacgtttcgagtttcttctctttacacgccggggttcgccagggcggtgtgctgtccccaatattgttttccgtcttcattgacgatattgtgacaaaggtcaaggccgcgaacgtaggttgctacatgagcactatatgcgctagcatattcttgtacgccgatgacgtgttgttggtggcaccaagcgtagctggtcttcaatctctgctgaacgtctgcgagaacgagttaataaacttagacatgagaatcaatgttaagaagtcgatgtgcgttagattcggtcaacgattcgatgcgccctgtgtggaattagtttcaatacatggtggcagcctgaaatgggtgagtagctgtagatacctcggcgtgtactttgtttccggccggacgttcaagtgctgctttcactccgccaagtcccaattctaccgggcgttcaattcattattttctcgggtgggtcgtgccgcatcagaggaaattattttagtcttgattaacgcgaagtgcatgcccatactcatgtatgcattagaagcgtgccccttactgtctagagacaaacaatcatttcagtttacgattacccgtcttttcatgaagcttttcagaaccggctcaccagcggtcgttgaggaatgcgaacgtcactttaacttcctgccgttcaaacaacaactcgacattcgtacagctaagttcttacaaagtttcatggcttcggagaactctttatgcctcttattcgagagtaacgcacgacttcaacttagttccatctattcgaattacggtcatacaattcggacagtgtgtcagttagtaaataagattcatgaacaatacttttgctacccatacgatgttccagattacgctctcgagcaccaccaccaccaccactga

SEQ ID NO: 390 - DNA, 2973 bp, synthetic construct
  source 1..2973: mol_type = other DNA
atgatggcggcattatctaactcgactcatttaatcggtaacagcaattgcacaggagcgcggctcgtagttatatcttacaatttacacggtttgaaccaagggatgacgggtattcgtgagttaattcgtcatgttaatccggacgtgatcatggtgcaggagcactggctcacctcagataatttatttaagctgtcggacatctccgataagtatttcgtgtttggcagttcggccatggacgcacgtgtttctgcgggacctcttgtgggcagaccgttcggcggaacagcaatgctcatcaagaactcgttcgtcaatatcacagtcggcatagctacgtgtgagagattcacagcgattaagttggcaaactggcttcttgtcaatgtatatctcccctgttcgggtacggaccaacgtctgctcatctattcggacgttctgtgcgaggtccaaagtcttattacggcccactctgactgcgattacctcgttggtggtgatttcaactcggaccttacagatgctaaaagccacgcatctaatcacatgataaacgacttcatcgttacgaataacttgtgtcgctgcgacgtggttttccctgtcgctaccaagtacacctacataaatgagagtcttgactgttcaagtactatagactacatgcttacgtccaactgtgacagcactattgccttcaatattgtcgacttggacctgaacttatcagaccacttgcctatcctcgttgtgttggcactcaacgctgatctttccaatgcgacatgtaacgctaacccgagcgtagacgtgacccacttacgttgggatcacgctcagatcaacgaatactatgaccttacccgcttgggactggacccagttctctgtgaactcaccgtggttatcaataaccttcattgcgctccagagtccatggtgtcggatcagatcgacgcattgtacgagcgcgtcgtaaatgtactgtcacaatgtgcagaccaatgtgtgccaaaacaaatcaagaacttcttcaagttctggtggagccaagaattagccgaattgaaggaaaaggcaattgccagttgtagattgtggaaagaggctgggcgtcctcgtaacggtccaattaatgttaagtaccgtcaggacaagctgttatacaagaaacgtattcgtgaggagcgcgcagaggagagttcttcctttaccaacgacctgcacgaggcgttgcttcggaagtcgggaagcgacttctggaaggtttggaacagcaagttcgagaacaagagtagtaagattatccaggtaggcgggactgcggacagcaacgttatagttaactcattcgccaagcacttcgaggaagtttgccaacctttcacagcggccagaaatgccgatctcaaggcccaatatgatgacgtgcgtgtaaactactcaacgcccccggtgttcagcgacgccgagatcttcgacgctgagttggtggggaatttattggtaaagatgaagaacgggaaagctgccggactcgacggcattacttccgagcacctgaagcacagtcacccttccgttgtggtgatcttgtgtaaactctttaacctgttcatcgcaacgggccatataccaatttcttttgcggctagctacactgtgccaattccgaagtgcgatggccgcagtaagtcattggaagttaatgactttagaggaatttcgatctctccggtgataagtaagctgtttgaactttgtgtcttggaacgatatcgtgactatttcgatacgagtgaccaccagttcggatttaagaagaccctttcatgctcacacgtgatttattctgtgcgtacagttattgagaacttcataagtaacggatcgactgtcaatctgtgcgccctcgacctttcaaaagcattcgatcgtatgaatcactacgctttatttattaagctgataaagcgaaagtttcctgtcgaaatactgcagatactcgagcactggttttgcggatctaaaacttgcgtgcgttggggcggtcaagtcagttacttcttcgctatggtggccggagtccgtcaaggtggggttctcagtccagtactcttttctatcttcattgatgacattgtaaacaaagtgaagctggcaaacgttggatgttacttatcgaatatatgcgtctctatcttcctttacgccgacgacattttactgatcgcacctaccgtaacgggcctgcaaaccctgcttaccgtgtgtgaacaggagttactggagttggatatgaagttaaacgtcgacaagagtgtttgtatacgattcggggaccaatttgacgcttcatgcacagatatcatgtcagtgcaaggcggccgattactgtgggtagactcgtgtagatacctcggtgtttatttcacatctggtcgtgtgttccgctgctgcttccacaacgcgaaatgctccttcttccgctcttttaatgcaatattttcgaaagtcggacgcttcgcgagtgaacaagtcatcctctcacttttgagaactaagtgcttacctatcctgctgtacggcctcgaagcttgccccgtacttaagagcgacaagcactcattaaacttcacgcttacccgcctgttcatgaagttgttcagaaccggctcaccagcagtggtagcggagtgccaactgcaatttaattttcttccgcttcaataccaggtagatatccgtactgctaagtttctcttccgctttctgaacagtgcaaattcattatgcatcttactgagtgtccatgcgaaagctcaattaaccagtatcctgagttcatacggtgaggatgtgtccagcatatacgacctgcatgtggccatcagtgatattttggtggcctacccatacgatgttccagattacgctctcgagcaccaccaccaccaccactga

SEQ ID NO: 391 - DNA, 2958 bp, synthetic construct
  source 1..2958: mol_type = other DNA
atggctagtgagcaaataaatcttcgggactgtgatagtgcggaaaagttgatcgtcattagctacaatttacacgggttaaaccagggacgtccgggtattaccgagcttatatctctcctctccccggatgctatcatgatccaggagcactggttaactcctgacaacatgtataagcttgaccaattatctgacaactaccttgttttcggctcttcagccatgaacgactgcgtactgtccggtcctttgattggtcgacctttcggtggcaccgctattatcattaagaagagtctggctagcgctactaagaacattatttcgtccgaccgttataacgtagttaagatagccaattggttacttttcaatgtttacatgccctgtgtgggcaccgactatcgggagtacttgtacgtggagatcctgtctgagtttgactctttgttagcagctaatcccaactgtagctgtttggtaggcggtgactttaacacctgccttgacaacccggtgaacgtctctgtgacaattaataccttcatcgcaaacaatatgttacacagatgcgacatcttattccccagtaacaataagttcactttcttcaacgagagtactcactccggaacggcaattgactacatgctggctagtgatcccaacgatattattgcgttcaatgtcttagacatggatatcaacttatccgatcaccacccaataatggcagtttgcgcttgccctaagctttctattgacccgtcgtcatgccagaccaatctgcccgagatccaacactttagatgggatcacgctcagctggataactactacgaacacacacggcgcttattgcaaccagtgtacgatgaattaaacgtacttgcatgctgtcacgtgtccttagacgccatgatagttgcggacaagatagacagtatttataaccggttcgtgaccgcgctgtgtgtgtcagcggagaaattcatcccaaaacaccgaaagaacttttacaaattttggtggtcacaagaattagacgctttaaaagagaagtctatagcatcctgtagaaagtggaaggaagcgggcaagccgagaaatggaccgattcaggcccaatacaagaaggacaaactcttatacaagaagtgcatcaaggaagagcaagccgctgagacatgctcgtttaccaacgaccttcacgacgccctcttgtgcaagtctaaccaggacttttggaagacttggcgtagcaagttttctaataactcaaacaatatcattcaggtagatggaatagccgacggtgcggcgatagcgaacaacttcgctaacttctttgaatcaaacagtaaaccgtttagtgactctcggaacgctgagctcaaggctcagtataccgagttgcgcgcagactactgtggatgtccggttactgacaatgagctgttcgatgttgaacttataggcaaattaatcaccgagatgaagaacaacaaggccgcgggtcttgacgagctcacatgtgaacacttgaagttcagtcatcctattgccatctgtatattaactcagttatttaatctcttcatagctctgtctcacataccatcctcatttggggcaagctatacggtgccaataccaaagtgtgacggacgcacacgggcgatgtccgtagatgactttagaggcataagtatatcacctgtaatctccaaggtctttgagatggctgtgcttgaccgctttgccccttatttcagaacgtcggaccaccaatttggtttcaaacgcaacattggctgccgtgaagcaatctactcagttagaaacgttatcgagacgttcataagcaacggctcaaccataaacgtttgcactcttgacttgagcaaagcatttgaccgcatgaatcactacgcacttcttatcaagctcatcgagcgaaagttgccgttccagcttttgatcgtgttggaaaattggttcttgatcagtataacatgtgttaaatggaacgggcacgtatcgcacttctttcgtctgctgctgggagtcagacaaggcggcgttttatcaccgcttttattcgcaattttcgtagatgacattgttataagagtgaagtccacgcacgctggatgttacatctctttggtatgctgttgtatatttctttacgcagatgacatacttcttgttagtcctactgtaagcggtctgcagatcttattaaatgcgtgtgaaaatgaactgaccgagcttgacatgaagattaacgtgaagaagtctatgtgcatccgtttcggtaagcggtttgacgtccactgtgcggagttggtcagtgttcaaggtggaccgattctctgggtggatagttgccgatatcttggtgtgtacttcttgtcagggcgttcttttagatgctccctcgacgatgccaagtctcggttcttcagagccttcaacgcgatatattccaaggtcggtcatttcgcctcagagactgtgatcttgaatttaatccgtacaaagtgcctgccaatcctgttgtatgcgactgaggcgtgccccttactgtctcgtcagaagcatagcctcgagttcacagtaactagaattttcatgcgcatatttcatacaggatctatggacattgtcaagcaatgccaatgcaactttgggtttctgagtgtttcctaccagttgagtgtccgaaccgcccgttttctccagaaactcgtagcctcagagaatagtctctgcttactgttctctcgcaccgcgtcggatcaactggctaagatcttctctttcttcgatgaggacataaagaccgcatgccaactcaacaactttctttacgagctgctttctgtttccttcaactacccatacgatgttccagattacgctctcgagcaccaccaccaccaccactga

SEQ ID NO: 392 - DNA, 2976 bp, synthetic construct
  source 1..2976: mol_type = other DNA
atggccaccaagtatagcaattgtgcgagtgacaacacatgtaacacacccgtgcatcgcttggtagtcgtttcgtacaatcttcatggttataatcaggggtgtcctgggatcttggaattaatgtcgaagataaccccagacgtgattatggtacaggaacactggttaactcccgataatctccacaagttaaacgacctgtcgaacgattacttcgttttcggctctagtgccatgagtgagcgcgtagcgtcaggtcctctgtatggcagacctttcggagacactgccatattcatcaataataagtacgcttctgttaccacgaatttagtaagccgagatcgctacacagcgataaagatagcaaacttcatgttgattacagtttacatgccaagcgtgggcacagcccaacgcgatttcctgtgctcagagttgctcgccgagctggacgccgttttaagctccaactccaactcaaattcaaattgccagttcttaatcggtggtgacttcaatacgaacttagactcgaacgcgaaagtttcacttgcaattaatgagttcatttccaataattccatataccggtgtgatgagatctttgacgtagcggactcttatacgttctgcaatgaaactgcacactgcttctctacaattgactacatgttgacatcgtgtgcccaagatatcatcgcctttaatgtcgtggatatggatataaacttatctgaccacaatccaatcttaagcgtatgttcatgttgcatcgatacacgaagcgtgaataagaatgaaaagtcagctgacttgtacgctgagttcttccgctgggatcacgctccagtcgacaagtactacgatcaaaccagagttcttatgcagccggtgttagacgagatttcgtcgctggtcataaacagtgcgtacatggataaggaaagcatcgcgattgcatcggactcaatatacgataacttagtagacgctatgcggtcctcagctaatttgttcattccgaagcatcgtaagaacttctttaagttctggtggtcccaggaacttgatgagctcaaagaaaaggcaatcgtgagctgtcgcgagtggaagagtgcgggtaaaccaaagagcggcgtcacgtttcaacagtatcttaaggacaaggccctgtacaagaagagtatccgttacgagcaacagcgggagaagtcctgttacaccaacgacttacatgaggcgttgttacataagaacgggcaggacttctggaaagtttggaagtcgaaattcgaaattgggtcaacaaacacgatcgttgacggtctggctgattccgcggccatcgccaataagttcgcgcaacacttagaatctaactgtcgtccattcaacagcgagcggagtgctgctctcaagattcaatatatcgatcaacgtgcgcaatattgtggcacacccataaccgactgtcaatggttcgatgttgagttaatcgaccggctgactcgtgagatgaagaacggaaaagctgccggtttagatgagatcttttgtgaacacttaaagttatctcacccaattgttgtctgcatcttatcaaagttgtttaatctgtttctgtcaaccggccacataccggcttctttcggggtatcgtacaccgtgccgatccccaaatgcgacgggcggacccgtgccctcactgtcgatgattttcgaggaatttctattagtcccgtaattagcaagctgttcgaaatggcagttttagatcggttctcacattatttcgttacgagtgactaccaatttggcttcaagaagcatttgagctgtagcaacgcaatattttgcgtacgaaatgtcattgagaacttcgtttcacgaggaactactgtcaacgtttgcacgttagatctgtcgaaggcgttcgaccgcatgaaccactatgcactgttagttaagttgatgtcacgcaagatcccagaccttctgttatgtatatttgaattatggttcagcatatcggtgacttgcgttaagtgggataaccacttttcacacttcttcctgctcatagtcggcgttcgccaaggcggcgtgttatccccggtgctgtttgcaatatttattgattcaattgtggacaaggtcaagagcacaaatgtgggatgttacatctcactgatttgttgttgtatcttcttatacgctgacgacattatactcatagctccgagcatccacgctctccagacccttctcaacgcatgtgaggacgagctgtttgttctggatatgtgtgttaacgttaagaagagcgcctgcatacgtttcggtactcgccatgacgcgcaatgttgcgagatcatctcatcgttcggtgggagcatcaagtgggttgaatcctgcagatatttaggcgtcttcttagtcagtggccggaactattcatgcagcttccatgatgcgaagagtcgattcttccgtgcattcaacgctgtctttggcaagatcggccgtatcgctagcgaggaagtcgttcttagtctgcttaaggctaagtgccttccgatcctgttattcgcaacggaagcgtgccctctgctgagccgacaaaagacctcattcgatttcactctgacaagaatatttatgaagctgttcaatacaggctctgcagtgatcgccaaggaatgccagaacttatttaattttctcccgattcgtatgcagttgagtatacgtacagcccgattcttgcaaaagtttgccgcatgtgagaacaacttatgcagcttattcgcagacatagccgtgaagcagctgaacgttcttttctcggagtacaatgtgaagacagcatgtcagttggcgaacgctatatatcggaagctgtcggaaaccctcaactacccatacgatgttccagattacgctctcgagcaccaccaccaccaccactga

SEQ ID NO: 393 - protein, 1057 aa, synthetic construct
MTGEDPQECAKCNYNMIDTKQAVDHCARKHHGMSVQWKCRKCERDWSNIRSIAAHYRHCTGRPPSPVATTATSHVCDQCERAFTGLAGLQLHRKRKHPAAYNESLPRPTGKNRLLGADELTRLAGVELDLGTSKRINLVCHDHFQHRSVDAIATIRKSKRYKDILKVVVETRSLVDEQEAGEGAQAPEPFINIVEAQLRTRFDELEGDSSPAVRDTLAYTRTSLAEGNATIGLDLLSEEVYRPRKAPDSTSNPRKRGPDFAPTTRSQKRRQLYKQIQSLYQRNRKQAVGVILDGDPIQTVFPDVDRADEVFRGRFARPSPPDDKVFNLVPGDTMNMGYITSEEISKCRSAMKKKNAPGPDKEVTMDLVLGLELTVLELIFNTWFALGQVPTAFKEARTILLPKSGDATDPNNWRPITICSLIGRLYAKLLAGRLSKCANLSERQKAFVPVDGCGENTALLSSVIAHAHKVKTQVHIAFLDLAKAFDTVPHTSILRALRRKALPEHFIAIVENLYSDANTSISVGDKSTPSIPMTSGVKQGCPLSPVLFNLVLDELIQNIGTIDGLSVGHSKLAILAFADDLVLISGTKDGLASNLRTCEELFNARSMKLNARKSMTLSLVRAHKRKTMLTDETPHWKVYGEFLPAVKHTEEVKYLGVRYTAGGRPMAKLPKLNDWLQKLKSAPLKPQQRIQIVRSTITSRVIHTLRLCRVHAKLLKNLDRKIRTFIKGVLHLPSGTSTDWFYIPIRMGGLGLQEFMSLIPAAKLKLIDGMKKSQDPTVVDAIRQEHWLKEERWCRAVSSLYGNKEQADRGRVERHISSHTGQTQIGFARLPGQCNWLEGGGKMTGRDYIVGCHMMSNTLSVRTRTFHGGVNRVTTCRYCPGVPETPSHALQSCSKVRDAVTARHNSLLTKIQHFLTPNFDSVIREPWFNGVEGRMNPDLVLIQGRLLYVVDLTVPYDSTIRFMDSQAQRNVDKYQVLEPLLRTKFQVERVKVLGLAVGARGLYTQTGVDIWATLGLTERQRRCVSAMALKQSCLIWGLFTGNRQPQPTLDTGTSAAE

SEQ ID NO: 394 - protein, 1174 aa, synthetic construct
MGSATLYWDIGIALPTKTNKKVARVSLTRNAHSESNKISDSNPSSTIYQIDYPIESESCSLCHEDLPNLNLKIREHINDAHGIVTIRYKCRNCGKEYDTISSIKSHYPACKRKQTNNNLAAAVAKPASTNPQFPVTHQNIPNIPPLQCVECHSKSSSFTAKDRKGLITHMRTKHPQAYEESKKVANIRIAWSNDEDNILANLEISLKSTQKGQILERLFNEWNKLVVQSHANYRSKDAIRARRQQQEYKAILRDLIQKQDDTNASSDDNDSSTDSDSPSIPATICNDMNAIHKLLNDIVIAGHIKLSDHMKNAIDAFLNPNKAIDPVKLTMSGINQSITDIRNKNNNNRNSSRVNGTATAINKKPARNKSRIEKSKQHAYYQRLYLKNKSRLMDEIIDGVAPNVDPPPIHTAIQYYEQIWSILVQDTHPVTTKPDFNNKDNTLLSPITKVEIQWAIKKTKRDSAKGVDQITLQEAKLLAEDDLYIAFNIWLGCKTIPSDLKLNRTTLIPKGKQGLDMITNWRPITISSILLRLFNKIIACRMNKYFEIDKRQLGFRPINGCSMNILWLHHLLKHARLNRRDLYVCLIDVAKAFDSVPHESIFRALVRHHAPSSFVELVRNQYADSYTSITYKNLSSKRIKILRGVKQGDSLSPLLFNLVTDELFGILKDQLGYNITNIGSSNIKCFADDICLISGSRIGMGHMISETVSFLNDRNLQVNANKCMSIGLQKGFKGKKSKIVTEPIFTINGSLIPILGHVENHTKYLGIQFTSVGMVNANVAKDRIIMVLNKLQKIPLKPQQKIDLIRSHVIPLFIYQLINLENYPKLLKEIDILIRRAIRSILHLNIGLSIEFFYLPIRDGGLQIPLLRDIVGLAKVRIYKYIMRSDDELLKHLVQKQAFPILHRFINELKLDSSYETSDIKLRKIQLVKDRRVSYAGKVHGYGSEVFSTCPSTNFWLYGDNKTVTGRTYINGIKLRTNTLETRVTVTRGCMVDKTCRMCKEENESLMHILQFCKTTKGLRYARHNSVCARVVKKLKERGFQVYVEQAYTTDETGLPTLLRPDIIAVKLDHAYVLDVQAVYESSGASFINAYKFKVDKYTPLIQAIKNRHKCKDVTIHGLIIGSRASFHHGHIRIWNEFGFSSSELKYMALNCLENSLRIWSTFNFNRLNSFNRS

SEQ ID NO: 395 - protein, 1162 aa, synthetic construct
MDYNILMRYEGRECIRCECGVVCTTQATIKEHWASVHRVCGLVLVCDKCNKRFVTLLAVSCHFCKCDAVEVESVGPEECNLCGRWFTQGRSMSAHQWKAHPLQWRARKGKAERKRRLDLVEEEDENVGRPYGQERKRARVDEDENAGHPIGEHVEVAGITPGNGEAIGVEVVFPDTQERVQMGVDEDDNTRHPVSEIEEGAGINPGNGEEVDVDAIHSDSQEQMRVDEDENAGHPVSENEEVVGNAPDNGELEVAGVTPGNGDLVDVHLVSQAAGIDEAVGSGLHVGAGIAPSESVEAFRAALRSLVVEGGLSGLVRDAVVNVLNDEGGERIGSVLKDLVQAIGLENATTPGTARRPGHRGGFGRHRHVGNKAASMYAGFQAMMTRNPSEVARWLWEGRAGEEGNVVPPMDHLVRIFGSVMSVDGVEDNEQIASCQEGVKVFYPVTSQDLDKALNKANASAPGLDGLRIESLKRMSGDNKSNAVALVNLALLAFGNYERTVRTVMIPKSTEHLEDADNWRPIAIASHIIRVGHRVLAHRLESQVKLHPAQRGFTRGDGLARNVWLLDAIIKHARVNNRTLCVVSLDIKKAFPSVSHSSIARAVDRFGCSPVFCEYIRSVYRDNATVLQCGKSVSDAILVKRGVRQGDPMSSVLFNMVMDELLCLLDPALGYKFDGTCVKAMAYADDLVLVARSVGAMKKLLTGTEEFLLKRGLMLNEKKSVALHLRRGKRAVVLSLEEVWSLREGAIGMVSEIKSLTYLGVRFGPYGKMNYDTKPLSDALGRLCRAPLKPDQKLLLLKTHLLPKALHSLTLGCCDKKLLKTLDMRVQHAVRSILHIKKDVPCAFIHGPSKHGGLGVMSFVADVPRHVCNRIEGVQLAGEGGEMRALVDSFYFESILRKLRTPATQVPDEYVAHLSRKNCRRNMSVRLKQADMSSKYDTRGITEVAEHGDSRAWLASKPVFWPARTYVNAVQWRCLSITCRSRVSHGRAGDRLCRTGCGKIETAFHISQVCPSTHLARVARHDRIVQLIKRSAESKGHAVVVEPRITTAAGIRKPDLVIANARSKTVFVVDVHVAWKGLRQAFDAKVKKYGRHKEISDFGRTLLPEAERVQFGAIVVSPRVIWAGANEQVVNGLQLPHGIRKVVLASCVEGTMKILSAFNAVQ

SEQ ID NO: 396 - protein, 1056 aa, synthetic construct; identical to SEQ ID NO: 8

SEQ ID NO: 397 - protein, 1396 aa, synthetic construct
YFHVVRPGCRSNRSGGKAFCPSALGGVYIPSAVVFAHIIVLSMAESNYSVSLVEGATAPSSATACTSVGDDCPSSVPFPDHSCFCEVCGVAFGSDSGLSLHQRAKHGEWYHQRRLPVFVRPGWSREEIVLVARAEIRLVWAARQSGMGEGRIRVNADLCRQFVNRKMDAIKYIRQTKGYKELLRKLEITMAEEGAEERELAPDGDTHLHQVMYGNWEQSQVVKHPRFVELPSKTVKQPVSVTETSESVPVGPVGEASGVVDGSKEGEDGVASPIRPQVVQRMWVTPEEKSRKGPKVRWGHELMIEVAREEQRLAGAFKMNVELHKRFPSRTLEAIKNMRRQDKYKALVKSLPAPHLVVTPPGPSEPQEGTPPQEVVSEENVGSSPQNVCTPLNVLCLSNEGIRPQIDCTMLPDDVSLNEVTMCEESFSIGGFGVDTPPRRIDGTDEGREKKKEDENDARDVSEPEPPSQACNPPQGDVSQAVGDVGGRTVDGQVGDSDQFDQGRDGGVGVETEYSSWKESLLEELVCAQGYLAGMDSLEFMDFRPGQLSREHREMLDIEYQRWVELELGSSHRRKGPRRRARRREAAGRKEAAGPAEAGGRRKRRRTEYARVQKLYRSNRSECSRKVLSGEWRSEETPSIPLEDQVVFWSRVFGEESVPDTRTVRPQGMVLWGLVEPITVDEILSTLRNTKDGAVGLDKISRKDISKLNPRALQAHFNLWLYAGYQPIEFRRSRTVLIPKVPEPSGPGQFRPIAIGSFISRVFHRLLAERLSGLLEFQSRQRAFIKGDGIADNVFLLRCLLRDTCEEVKPLSLAFLDVSKAFDSVSHATLLLAAERMGAPGPFISYLRTLYSEASTVLHVDGRFSDPLMQNRGVRQGDPLSPLLFNCVIDWALASLDPEMGKVVGGGPRLNHLAFADDVVIIAESVVGLQHLCGQFERSLGRCGLTLNVDKSRTLRIATDGKAKRWVCDPTPFVSLAGGLMPAVSIAHAYKYLGVHISARECDSTPEEILTRGLNQLKAAPLKPQQRLYMVRTHLLPKLHHKLVLSRTRGGVLNRLDRLVRRSVRLWLNLPHDACNSYIHSEVKHGGLGIPSLRLTIPFMKSARLRRLAALRDPVFVALVASSRTFAEEVKRCADPPVRVGDTIVTSVPAAKEALAEQLHSSADGYGLRSSAGVPYVHSWVSDGTALMSGSAFIHATQIRGATVATKKRSARGRPEANTACDCCGRPETLGHVLQVCHRTWGSRIKRHDALMEKFLQALEIRGGSIVRAPVIPVVGGSPQKPDGVIYFQSHCWVVDASVVADNADLDNAHLSKCAKYDTPTVRDWCQSNWPSHMGGHGIVRFGALIFNWRGVMSRLSARMCDLLNVNRTVQKVMAVCVVEHGWSMYREFHRSTAWR

SEQ ID NO: 398 - protein, 1073 aa, synthetic construct
YAINQALVKVTAGRTLEAIKSHRKLPAYRQMVRSYLRTTGGLIVDEAVVPARIVAEVTGGATSGPQDDNSRQGDDRSSPVATRVAEVRSPGPQPATLAVAAGPAGPTGRSNDRNMTDNQITTMADVHQLHTGRIPSGAICPPDGKHKRKVTPRPEARVETRPLSPIISRWSDEETDSDPLPDTQNINTPVREEIERASHGIAEGMAGEYDWRAPVKTELLNLATDANICPELLHEVLLSPCGDRELLQELIDVDLLGFFPPAERPRRNVRRRPEQQAPVTSRAKRRAAYSRVQALYKKSRTSCARTILAGKWREVAPSVELREQVAYWKTLFEHESQEDSREPPAEGAPEWEIVNPVTKDEVARHMRGLKDGAAGPDGKLRKHLKGLNTGALAARFNLWLLAGMAPDAFREGVTVLIPKSNDSTLPQDHRPITLGPILCRLYHRILAERVERHYRISERQKAFRRGDGLAENCYILRTVIDDRKARCQATNIAFIDVSKAFDSVSHESIFLAAASAGIPDPLVDYVRSVYGGLRTRIRANGELSEVIAVNRGVRQGDPLSPVLFNAVIDLALRHMDPEIGVKVDSERLSCLAFADDLVLLASTPQGLQKQFSGVERALCRSGLALNVGKSATLRLDVHGKRKRWACNPVGFLKCRNGGTMRAMSITDGYMYLGNTVSAGVASEKSVLILKAGIKELTQAPLKPQQRMYILRNNLIPSLMHSAVLGSISKKSLKFLDTMTRAAVRSWLRLPRDAPFGYFHADFRDGGLSVTPLLWTVPLLRTKRMTKLVASPDPVARAVSRLPIFARERNRWSRPLSAYGLPIRDAVGIKRAMAEGLHTSVDGRGLNGSFASGHVNAWMTSGTARMTGSGYVNCIRIKGNLPYTRARAARGRPEKPIRCDACNEVESLGHILQRCSRTHQPRNDRHDKINKFLNQSLKKLGFQTQVEPPIPTTQGVRYPDLVAWRDGRCVVIDTTVVADNRNPDEAHARKATYYDTAGVRKWCADKSGVPVKDISMSACALTWRGIPSQRSVRELSTLGITKSHWQVMSIQALEGSVKCYAHFFHSTSGTRAVP

SEQ ID NO: 399 - protein, 768 aa, synthetic construct
AHYRHCTGRPPSPVATTATSHVCDQCERAFTGLAGLQLHRKRKHPAAYNESLPRPTGKNRLLGADELTRLAGVELDLGTSKRINLVCHDHFQHRSVDAIATIRKSKRYKDILKVVVETRSLVDEQEAGEGAQAPEPFINIVEAQLRTRFDELEGDSSPAVRDTLAYTRTSLAEGNATIGLDLLSEEVYRPRKAPDSTSNPRKRGPDFAPTTRSQKRRQLYKQIQSLYQRNRKQAVGVILDGDPIQTVFPDVDRTDEVFRGRFARPSPPDDKVFNLVPGDTMNMGYMTSEEISKCRSAMKKKNAPGPDKEVTMDLVLGLELTVLELIFNTWFALGQVPTAFKEARTILLPKSGDATDPNNWRPITICSLIGRLYAKLLAGRLSKCANLSERQKAFVPVDGCGENTALLSSVIAHAHKVKTQVHIAFLDLAKAFDTVPHTSILRALRRKALPEHFIAIVENLYSDANTSISVGDKSTPSIPMTSGVKQGCPLSPVLFNLVLDELIQNIGTIDGLSVGHSKLAILAFADDLVLISGTKDGLASNLRTCEEFFNARSMKLNARKSMTLSLVRAHKRKTMLTDETPHWKVYGEFLPAVKHTEEVKYLGVRYTAGGRPMAKLPKLNDWLQKLKSAPLKPQQRIQIVRSTITSRVIHTLRLCRVHAKLLKNLDRKIRTFIKGVLHLPSGTSTDWFYIPIRMGGLGLQEFMSLIPAAKLKLIDGMKKSQDPTVVDAIRQEHWLKEERWCRAVSSLYGNKEQADRGRVERHISSHTG

SEQ ID NO: 400 - protein, 520 aa, synthetic construct
NATIGLDLLSEEVYRPRKAPDSTSNPRKRGPDFAPTTRSQKRRQLYKQIQSLYQRNRKQAVGVILDGDPIQTVFPDVDRTDEVFRGRFARPSPPDDKVFNLVPGDTMNMGYMTSEEISKCRSAMKKKNAPGPDKEVTMDLVLGLELTVLELIFNTWFALGQVPTAFKEARTILLPKSGDATDPNNWRPITICSLIGRLYAKLLAGRLSKCANLSERQKAFVPVDGCGENTALLSSVIAHAHKVKTQVHIAFLDLAKAFDTVPHTSILRALRRKALPEHFIAIVENLYSDANTSISVGDKSTPSIPMTSGVKQGCPLSPVLFNLVLDELIQNIGTIDGLSVGHSKLAILAFADDLVLISGTKDGLASNLRTCEELFNARSMKLNARKSMTLSLVRAHKRKTMLTDETPHWKVYGEFLPAVKHTEEVKYLGVRYTAGGRPMAKLPKLNDWLQKLKSAPLKPQQRIQIVRSTITSRVIHTLRLCRVHAKLLKNLDRKIRTFIKGVLHLPSGTSTDWFYIPIRM

SEQ ID NO: 401 - protein, 615 aa, synthetic construct
RPINGCSMNIQWLHQLLKHARLNKRDLYVCLIDVAKAFDSIPHESIFRALTRFKASSSIIELIRDQYTNSSTTIVYKDLSSKRIPILRGVKQGDALSPLLFNLVIDELFEVMKDQFGYNIANIGSTNIKCFADDMCLISSSKSGMGFLINEATTFLENRGLQINANKCMTIGLAKAYKGKKSKIITESTFNIHGTPIPMLGHVEHTAKYLGIYFTSVGSVKAIVTKSNIEIVLDKLQQIPLKPQQKIDLIRSYIIPRFIYQLINLEVYPKLLKQIDLLIRRSIRSILHLHQSLSIEFFYLPVRDGGLQIPLLRDIVGFAKVRIYKQIMNSNDAVLQYLMESQGFPIIHRFLNELQLSSSFETNDIVVRKNQLMRDKRVSFGNKVHGQGYEVFSTCPMTNFWLYGDCKTMTGRSYINGIKLRSNTIETKVTLTRGMSVDKSCRLCNNEYESVMHIMQFCKGTQGLRYKRHHYVCNRVINKLKERGFVVFSEKAFMADTTGLNTLRPDIIAVKNNHAYLLDVQCVYETSNASFINAYNYKVQKYTPLVQAVKDRHCCVEVTIHCLVIGSRGSLYHNHLSIWYSLGFTSSELKYLSLNCMENSLRIMSTFHESVKNNR

SEQ ID NO: 402 - protein, 1187 aa, synthetic construct
MTSSQSCSQPVCSRSKPSDTTVLSDFQSQPTRKRASAKQKDSQSSETRSCVSKKDTTLWNDDLVSQLLEIRKMVVPDPNCKVAPYGSWKRIHQIWKERKLPNMTEQQLRQKWTQLNRKKNVDKLVNQTEEMNSEVHNLDENEKIRMSDLYKKLEPLIIDPNNFTLPIESRTSTRMKRIPSSSDLKVLNLLFSDLYPRIENLFHDKLLAIDTLLYTIVHKYKSIKEPMQQAIYDKKEQDLINAIKNITRKLRPLYAAMHRMRNGVKETSQKIVQQIVEEYKTFDLKSLTTKIGMMKQERNRYKRILSEYKKRKKFFRTNEMFMVNEKKFYSMIENRNKTKRETPDEKEVVQFWSSIWERKKSCNLDTAWIKEISKKLEEKLSLVDKENTRNSRKLKTKTANNLKQVNSIFNLNISHIFKSIHKKKNWSAPGPDMICNYWWKYIDSTWPKLLEAFQQMLNNTVPIPEWFCAGVTYRIPKQGPPCEANIRPITCLNTVYKMFTSIVLSYLSAYLDQHNLMTIEQRGAKKGVWGTYENLLIDEIISQDANKHRNKSFSAAWLDITKAYDSIPHEWIMKCLEIHKVPNEIKAVIRQLMEKWSTRIYYDFQKKTRTIQIKNGIFQGDSLCPFLFCLALNPISILIKSWNCGYKLNSADMVITHSMFIDDIKLYSTTQDKMNGILSLLKSALSDIGLSINDKKSGTLIRCKGMISEQGVKLQDGTSFPAITKTNLYRYLGFMQSLGIDKEKNKEMVINEFKERVERLVNSSLSGFHLARAYNTYCIGYLRYFFFMKWNYYELNRMEQILKKSLKQKGLFFRGFPVALFHLPRDKGGRGFQSVFMEYLIYRIGLAFKFHKSPHMERITNLLRDKDCDSFYNDTLTYGKEFGLQFEFQKNQNIIIKDSETKEELNISSKKKLTQLLRDRANKKWLTEAEEGGMHFKFWNMYKERLSWIKNWRFITKQCENMLWMAMTANLQTRSLTKWYNTQHSNGLKQQNNIKCRLCGKANETTEHIVSGCSALMNSDIIPRHNSVLYHLLRMILDRNGIQHNGTVQMEYSTDKVRIQCNCKILTIREVEHNVPDLVVYLHERKQIQIIDIAVPYDDNLEMRYNEKIQKYGPLQIELQKLNPGYKATVIPIVIGAFGVTLPSFQENLKKVLGENCLYEAKKLIRAAISGTFLILTKWESRAKIVD

SEQ ID NO: 403 - protein, 978 aa, synthetic construct
MDNCNIITYNMHGFNQGAELVKSYCSNALSDFMLLQELWLSSDSLYKLDNIAHGYSCFSVSSMDSVLENGLLRGRPFGGLAILVRENHRNLCSLLASNERLIAVVYNDILIINVYFPCSSRLNYKDETLDLLVQIEELLGCFVGDKVVIGGDLNCTLEIESWSSKLIRGFIDDHNFISCNNLPIDVTGTVYTYSNEVLGHYSYLDYFVVSNNLSLSIVSLKIGCDELNLSDHSPVSMEAKNIINVDYKKSNSSCNKGDLIPETCYHNRWDHADTVGYYESTRVGLQPVLEDLRSCLTNLKTVNVSNTKQRMKESIDSVYITILAVLNDAAYRHVPRIKANILKFWWDQELSDLKSKAMASNKVWIEVGRPRSGYIFDVRKADKYKYKSLIKRKQLEIRNNITNDLHDALVQKDTEDFWKVWKSKFPNKKVNKFPLIDGSSDPNIIANKFVDFFSNVCTSEPLAYKNANNDFLNRLQDFRGDSTSNTDTVSVELLEEVLESMSRGKAAGLDNLTIEHIQFAHPIIITILKELFNCFLEVGMVPDGFRDGLAIPLPKNDNASHNVNVDNFRCITISPVISKLFEHCLLRLFSKYFHSNDAQFGFKKKLGCSHAIYSVKQVVDYYVRGGSTVNICTIDISKAFDKVNLFILLGKLMDRNIPNCVIMVLFDWFTNSYITVKWLNVLSLRCQVNSGVRQGGVMSPVLFAIYVDEILDKLNNSGLGCNVKGLTVNSFMYADDLIILSASVTHLQKLINICVDELKSIQLSVNAKKCFCMRIGKRYAVSCNSVVIDNYHVQWTNEIRYLGVYFTAGHLLKFNFVPYKRRFYRCLNCILNKTGIKAINVVLSLTQSYCVPFLLYSVESTNLTATEKLRLASPFKMLFSRLFNSFDAQTITYCQYYTGYLTLEFVIDQRRLKFLNNICNLNNVVIHSLFRLNGATEISSLIAKSRMIAKYNTNMFDIKSIKYSMWNSFILVNNLGVK

SEQ ID NO: 404 - protein, 745 aa, synthetic construct
DLNLSDHSPVRIDLSNIISTNCKYPNTEKPYTKSCYQNRWDQADVVGYYESTRLGLEPILTYLRSFSKYSGTPNDSDAIRECIDSTYNSIISVLNNAAYQHVPRVKANVLKFWWDQELRELKDKAIASNKVWIEAGRPRNGLIFETRKGDKYKYKSLIKRKQLETRENITNDLHEALLNKDNDGFWKTWKSKFPPKKTNKYSLIDGSTDPSEIAEKFGNYFSSICTSETSVYNSSKNVFLERLGEYIGYGDHNNDYITSVELLEEVFESINNGKAAGLDSLTIEHIKFAHPIIVTILKELFNYLLEYGVVPEGFRNGLAIPLPKDDISGSKIGVKIENFRCITISPVISKLFEHCMLRLFSKYLQSNDAQFGFKKKIGCSHAIYSLKQVVDYYVRGGSTVNLCTLDISKAFDKVNLFVLLGKLMDRKSPNCLINVLFDWFSHNFITVKWLNVLSSSFQVNLGVRQGGAMSPVLFAIYVDDLLVKLNSSRLGCTVKGLTVNAFMYADDLIILSASVTDLQRLINICVDSLTTIQLSINAKKCFCMRIGKRFSVDCNNVIIDNYPIQWCSTIRYLGVYLMSGHVIKFNLDYCKKRFYRCLNSILSKTGTKVIDILLSLTHSYCIPVLLYATESMSLTVTEKQRLASPFQRLYFKIFSTFDPQTIAYCQYYTGYLPLNYTIDLKCLKFLTNIANTTNVFLNLLFSLNGTTSIKNVCAKYNTNKMDLISVKNAMWNVFIQVNMLNFCSS

SEQ ID NO: 405 - protein, 976 aa, synthetic construct
MMQMMQLIMFMQLTLFKMAEKLTIISYNLHGLNQGKPGIDEIISKIEPDLIMVQEHWLAPDNLGKLNSLSSKYFVFGSSAMNLVVSSGPLCGRPFGGTAILINNYHVSSVVCITTSDRFTAIKLYNWLFITVYMPCVGTAQRDELYLNILADLQAIISDHSECHCFIGGDFNIDLNSQSNSNISLTVNEFSEYHSLSRCDELFSVGNKNTYINESNNTSSTIDYMLATDCDRIIAFNVLDIDINLSDHVPILAICACDVSPIPLCEATKSKCSAKVSHLRWDHAPLELYYEHTRQLCEPVLNSLISLIACRPADAATDAFIVDSVDQCYTSLVNILRESANLFIPKHQKNYYKFWWSQELELLKQNAIASCRAWKDASKPKHGVLFFKYKQDKLLYKSRIREEKAREHLSYTNNLHGALLDKSGPNFWKVWKSKFENNSTKVIQVDGTADNALIADKFAKYFESNCTPFSAVRNEELKIEYNHRRSSYNGSPIIFSQLFDVELLSNLIDKMDNGKAAGLDDLSSEHLKYCHPIVICLLVKLFNLFITLAHVPDSFGKSYSVPIPKCDGHTRALSVDDFRGISISPIISKVFELAILDKFSRYFTTSDHQFGFKKRVSCRHAIYCVRNVIEDFINNGSTVNMCALDLSKAFDRMNHYALLNKLMDRYLPIEILSIMESWFSFSVTCIKWVSHVSPFFTLLAGVRQGGVLSPVLFSIFIDDLILKVIKTNLGCHISNNCVSIFLFADDILLLSPTITGLQSLFNTCERELEKVDMRVNAKKSMCVRFGLRFDAPCIELNSIHGDSLKWVSNCRYLGVHFTSGRVFRCSYDSAKSSFFRAFNAIYSKVGQTASEETVLALLRSKCLPVLLYATEACPMLVRDQKSLEFTVTRVFMKIFRTGSSTVIAECQRNFNFLSIQRQLTIRTAKFLQAFTASDNQLCVLFKSNATHQLNIILSSVSVESIGQLISVLYDQLYCLQ

SEQ ID NO: 406 - protein, 972 aa, synthetic construct
MDNCNIITYNMHGFNQGAELLKSYCSNALSDFMLLQELWLSSDSLYKLDTIAQGYSCFSVSSMDSVLENGLLRGRPFGGLAILVRENHRNLCSLLDSNERLIAVVYNDILIINVYFPCSSRLNYKDETLDLLVQIEELLDRFVGDKVIIGGDLNCTLEIESWSSNLIRGFSDDHNFISCNNLPIDVTGTEYTYSNEVLGHYSYLDYFVVSSNLSSSILSLKIGCDELNLSDRSPVSMEAKNINNVDYKKSNSNSNKGDQISETCYHNRWDHADIVGYYKSTGVGLQPVLEDLRTCLTNFKSVNVSNTKQRMKDSIDSAYNTILAVLNDAAYRHVPRIKANVLNFWWDQELSDLKSKAMASNKLWIEAGRPRSGYIFDVRKADKYKYKCLIKRKQLEIRNNITNNLHDALVQKDTEDFWKVWKSKFPNKKVNKFPLIDGSSDPNIIANKFADYFSNVCTSEPLAYKTANNDFLNRLQDYMGDSTSNKDIVSVELLEEVLESMSRGKAAGLDNITIEHIQFAHPIIITILKELFNCFLEVRMVPDGFRDGLAIPLPKNDNASHNVNVDNFRCITISPVISKLFEHCLLRLFSKYFHSNDAQLGFKKKLGCSHAIYSVKQVVDYYVRGGSTVNICTIDISKAFDKVNLFILLGKLMDRNIPNCVINVLFDWFAKSYITVKWLNVLSLRCQVNSGVRQGGVMSPVLFAIYVDEILVKLNNSGLGCNVKGLTVNSFMYADDLIILSASVTHLQKLINICVDELNSIQLSVNAKKCFCMRIGKRYAVSCKSVVIDNYHVQWTNEIRYLGVYFTAGHLLKFNFVPYKRRFFRCLNCILSKTGTKAINVVLSLTQSYCVPFLLYAVESTSLTATEKLRLASPFKRLFSRLFNSFDAQTIAYCQYYTGYLPLEFVIDQRRLKFLNNICNLNNVVIQSLFRLNGDTEISSLVAKYNTNMFDIKSINYSMWNSFIIMNNLSVE

SEQ ID NO: 407 - protein, 416 aa, synthetic construct
GPVRHRCTWWWSEDVRAAVEEKRLAYRKWLQSRLDEDLARYRVARRKAKRCVAKAQAGEREKWRASLSEPAGQKRVFAMARRMAREGRDVSGVPCVRAESGRVIVEGDEMKEVWARYWSRLLNEENPWDGGQGSAPVEGPELSVSASEIEFALRAMKRGKAAGPSGLVAEMLVAGGPFLNGWFTSLCDLIWRTGEIREDWALSVLVPVFKGKGDPLSCGSYRPIKLMEHGMKVMERVLERRLRAVVSVDGMQCGFMSGKSTTDAIFLVRQLQEKYLDKRRSLWCMFVDLEKAYDRVPRELVRWALRLKGVTEELVRVVMPMYVGSHSLVRTSVGETRSFDVGVGLHQGSVLSPLLFAVVMDEVVREVKVGMPWEVLFADDLVLLAQTRELFARYRAWKNAMMGSGLKVNVVKTKVV

SEQ ID NO: 408 - protein, 740 aa, synthetic construct
MREEMEKFQQLTFMTMDANKLQIVSYNCKNFHTDGDKFIFVNSLFSNTQFLLLQETWLYESEFKKLLNIGINSEHIATSAMNESKHRIGRKFGGTAIVWESSIKGKITKIDLQHERICALLFTKDQYSILIANVYMPCDNHAGDEEYTNVLNVISQCLYKYNPSHIIIGGDMNVDFVRNSPNTHILFDFITDFKLVKCIDFPCASVPYTYINHSGMTSRIDHFFISESLKKSITYCDIVDNHLYSDHVPLRVVLDIDIQHIIDVRERPFTIKKAWHRANDQDIVKYKDNLDSLLSDLVIHDSILHCNNYNCLLHREELCTLYEAVINACIKASEHIPNTSGSARKVKPGWNDEVKCLREDALSWHHFWNINGRPRDGYVAEMHRITRARYHRSIRQLKRDHDKLRMEKMADSLLSDNSRDMWAEIRKMKGNSSKMACSIDGCYDNDEIVNVFSDKYMSLYNSVPFDSDEMCSIKSEISARIDKCNHGYSISTEDIVNAVTHLKCGKSDGAEGLYSDHFIHGTGRFYVILSLLFTLFLSHGFSPESMIIGTMIPIPKDKKKSLSNSSNYRAIALSSIFSKILDWIILIKEQKSLFSSELQFGFKKGLSTTQCTNSMLETIDYYNFNKSSVYVLLLDANKAFDRVNYCKLFDELLKRDLSPLVLRLLLYMYTNQTLRVRWGHTMSDSFGVSNGVKQGDVLSPLLFAIYTDGLLVRLQETGVGCHMGHRFSGALANADDLTLL

SEQ ID NO: 409 - protein, 977 aa, synthetic construct
HFHDSGENLTFIDTLMCDTNFLFLQELCLYENEFEKLLNLSNNCDFTATSAMDEKVHRIGRPFGGTAIIWNSSITGHINKVECDNNRICGLLYIMNNVTMMLLNIYMPCDKYTDDFEFIDVLNTISQLLHKHNPSHVVIGGDMNVDFIRTSPNTRVLSDFITDFNLYTCIDLPDSNVPYTFINHNNNTSRIDHFLVCESLKDAISDCYIVDNHLFSDHVPLNICFNLDVTYIAEVERPFTIKQAWYKATDFDIEKYKKRLDGLLENIIVNDSMLYCSDYNCIDHKEELCELYNTVINTCITASDHIPTTSNRTKIKPGWNDNVKQLKEDALSWHHFWKINNRPRAGYVAEMHRISRARYHRAIRHIDRNASKIKSEKIAEAMLSNNSRDMWSEVKKMKGRNSKLTCSIDDCSDSNDIANIFSSKYMELYNSVPYDVDEMKKIESRIMDRIDDCSDDNYSISVRDVIDAVARLKHSKSDGSEGLFSDHFIYGTNRLFVILSLLYSLFLSHGFSPDSMILGTMIPIPKNKKKSLSHSSNYRAIALSSIFSKIFDWIILIKEHSSLCSSDLQFGFKKDTSTTQCSYSMLETIDYYNFNRSNVYVLMLDASKAFDRVNYCKLFNELLKRDISPLVLRLLLYMYTSQCLRVKWGHTLSDCFTVKNGVKQGGVLSPILFAIYTDGMLQKLESTGVGCHMGSHFTGALAYADDITLLSPSISGLKILIEVCEQYARDFDILFNGNKSQLLFYRGRGCVSCYKDIVVNEQCVKYSNSAVHLGHVISPDDKDCILRNAKANFWKKFNIFMSDFGNLSCYVKSKLFQQYCCSMYGSPLWSLRGSAVQSLCVAWRKALRSLWRVSPRTHCDLITALSFQIPLHSNLTKRFAKFIIKCLGSENRIVNIISHIAIRNPLSCAGNNYRDLLDRNSEVDFKTLLFNWNERADTIENLVRTLHELIEMRDGLKECIGLTFDEIELFITDICIH

SEQ ID NO: 410 - protein, 975 aa, synthetic construct
MSLTMPANNNLFNFTTVVCNTDVTSKLVIISYNLHGLNQGLHGLRELISKCNPDVLCTQEHWLTPANLYKLKSISSAYSAYGSSAMSDTVSRGPLVGRPFGGTAILVKKKFDSATSNIVCRDRVTSICILDWLIVNVYMPCAGTVDQLLLYSDTIDYIDSVLFECPGHNICMAGDMNTDLNVFSPISDLVNNFLLRNKLHRCDILFPVSLKYTYMNESLNCSSTIDYMFTSSVYVTVAYNIVDLDVNLSDHVPLISVCLCRPLVQSRDDTIKCPVDVEHFRWDHAPTHLYYEQTRMLLQPILDDVNFLLCTNDTDGKFEINSTNIIYDKIVQALQESANKFIPKRRKNFYKYWWNQELDELKDKAIASCKLWKEARKPRSGPISVKYKQDKSNYKLGIKRAQNADVSFYSNELHDALMRKNGREFWKVWNSKFTKSSDGHLLVDGLSDCAKIANKFADHFKMVCQPFSEKRSTELKAMYDSARANYVGQSIIDDQRVFDVQLISEKIMQMKSGKAAGLDKLSAEHLMYCHPIISVILCKLFNICMLSGHVPSGFGASYTVPIPKVEKSCRSLTVDDFRGISISPVISKVFELCLLDRYQDHLITSDHQFGFKHSIGCRHVIYNVRKTVDHYVNNGSTVNICSIDLSKAFDRMNHYALFLKLIKRGIPLALLSVMEYWFKLSVTCVRWCGYESPFFRLLAGVRQGGVLSPLLFSIFIDDIVYRVISTKVGCYISHVCVSIFLFADDILLLAPTLFGLQKLLSACEDELEFIDMHLNAVKSVCMRVGARFDASCASIYTHLGVALKWVETCKYLGVYMVSSKTFNCVFDEAKRKFFRAFNALYGRVGRSASDEVVVSLIKAKCLPIMLYGAEVCHLTKYQIRSFDFSINRLFMKIFKTGSISVVHECQVNFNFISVGYLIDIRESKFLYDFSNVNNYICQLFTKHANYRLSELYSLYGVSTVGQLRVAAQIAFASDC

SEQ ID NO: 411 - protein, 330 aa, synthetic construct
NGKAAGLDGITSEHLKNNHPCLVVILCKLFNLFILTGRFPVSFATSYTVPIPKCDARSKSLEVNDFRGISISPVISKLFELCVLERYCDYFATSDHQFGFKKNLSCSHVIYSVRTVVENFISNGSTVNLCCLDLSKAFDRMNHYALFIKLIKRKFPLEILKLLEYWFCMSKTCVRWDGQMSYFFAIVAGVRQGGVLSPVLFSIFIDDIVHKVKSANVGCYLSNVCVSIFLYADDILLIAPTVTGLQTLLTVCEQELFELDMKLNVTKSVCIRFGEKFDSLCSDVVSAQGGKLLWVDSCRYLGVYFTSGRVFRCCFHNAKCSFFLSFNAIF

SEQ ID NO: 412 - protein, 958 aa, synthetic construct
MDNCNIITYNMHGFNQGAELVKSYCSNALSDFMLLQELWLSSDSLYKLDNIAHGYSCFSVSSMDSVLENGLLRGRPFGGLAILVRENHRNLCSLLASNERLIAVVYNDILIINVYFPCSSRLNYKDETLDLLVQIEELLGCFVGDKVVIGGDLNCTLEIESWSSKLIRGFIDDHNFISCNNLPIDVTGTVYTYSNEVLGHYSYLDYFVVSSNLSLSIVSLKIGCDELNLSDHSPVSMEAKNIINVDYKKSNSSCNKGDLIPETCYHNRWDHADTVGYYESTRVGLQPVLEDLRSCLTNLKTVNVSNTKQRMKESIDSVYITILAVLNDAAYRHVPRIKANILKFWWDQELSDLKSKAMASNKVWIEVGRPRSGYIFDVRKADKYKYKSLIKRKQLEIRNNITNDLHDALVQKDTEDFWKVWKSKFPNKKVNKFPLIDGSSDPNIIANKFVDFFSNVCTSEPLAYKNANNDFLNRLQDFRGDSTSNTDTVSVELLEEVLESMSRGKAAGLDNLTIEHIQFAHPIIITILKELFNCFLEVGMVPDGFRDGLAIPLPKNDNASHNVNVDNFRCITISPVISKLFEHCLLRLFSKYFHSNDAQFGFKKKLGCSHAIYSVKQVVDYYVRGGSTVNICTIDISKAFDKVNLFILLGKLMDRNIPNCVIMVLFDWFTNSYITVKWLNVLSLRCQVNSGVRQGGVMSPVLFAIYVDEILDKLNNSGLGCNVKGLTVNSFMYADDLIILSASVTHLQKLINICVDELKSIQLSVNAKKCFCMRIGKRYAVSCNSVVIDNYHVQWTNEIRYLGVYFTAGHLLKFNFVPYKRRFYRCLNCILNKTGIKAINVVLSLTQSYCVPFLLYSVESTNLTATEKLRLASPFKMLFSRLFNSFDAQTIAYCQYYTGYLPLEFVIDQRRLKFLNNICNLNNVVIHSLFRLNGATEISSLITKSRMIAKYNTNMFDI

SEQ ID NO: 413 - protein, 840 aa, synthetic construct
QIEELLGRFVGDKVIIGGDLNCTLEIESWSSKLIRGFIDDHNFISCNNLPIDVTGTEYTYSNEVLGHYSYLDYFVVSSNLSLSILSLKIGCDELNLSDHSPVSMEAKNIINVDYKKSNSSSIKGDLIPETCYHNRWDHADIVGYYEFTRVGLQPVLEDLRSCLTNLKTVNVSNTKQRMKESIDSAYITILAVLNDAAYRHVPRIKANVLKFWWDQELSDLKSKAMASNKVWIEAGRPRSGYIFDVRKADKYKYKCLIKRKQLEIRNNITNDLHDALVQKDTEDFWKVWKSKFPNKKVNKFPLIDGSSDPNIIANKFVDYFSNVCTSEPLAYKNANNDLLNRLQDFICDSTSNKDIVSVELLEEVLESMSRGKAAGLDNLTIEHIQFAHPIIITILKELFNCFLEVGMVTDGFRDGLAIPLPKNDNASHNVNVDNFRCITISPVISKLFEHCLLRLFSKYFHSNDAQFGFKKKLGCSHAIYSVKQVVDYYVRGGSTVNICTIDISKAFDKVNLFILLGKLMDRNIPNCVINVLFDWFANSYITVKWLNVLSLRCQVNSGVRQGGVMSPVLFAIYVDEILVKLNNSGLGCNVKGLTVNSFMYANDLIILSASVTHLQKLINICVDELKSIQLSVNAKKCFCMRIGKRYAVSCNSVVIDNYHVQWTNEIRYLGVYFTAGHLLKFNFVPYKRRFYRCLNCILSKTGIKAINVVLSLTQSYCVPFLLYSVESTSLTATEKLRLASPFKRLFSRLFNSFDAQTIAYCQYYTGYLPLECVIDQRRLKFLKNLCNVNNVVLQSLLRLGGASEISKLLEKYNIVNNDNKSITYAIWNSFILENNLCVDH

SEQ ID NO: 414 - protein, 837 aa, synthetic construct
MPCAGTVDQLLLYSDTIDYIDSVLFECPGLNLFMAGDMNTDLNVFSPISDLVNNFLLRNKLHRCDILFPVSLKYTYMNESLNCSSTIDYMFTSSVYLTVAYNIVDLDVNLSDHVPLISVCLCRPLVQSRDDTIKCPVDVEHFRWDHAPTHLYYEQTRMLLQPILDDVNFLLCTNDTDGKFEINTTNIIYDKIVQALQESANKFIPKRRKNFYKYWWNQELDELKDKAIASCKLWKEARKPRSGPISVKYKQDKSNYKLGIKRAQNADVSFYSNDLHDALMRKNGREFWKVWNSKFTKSSDGHLLVDGLSDCAKIANKFADHFKMVCQPFSEKRSTELKAMYDSARANYVGQSIIDDQRVFDVQLISEKIMQMKSGKAAGLDKLSAEHLMYCHPIISVILCKLFNICMLSGHVPSGFGASYTVPIPKVEKSCRSLTVDDFRGISISPVISKVFELCLLDRYQDHLITSDHQFGFKHSIGCRHVIYNVRKTVDHYVNNGSTVNICSIDLSKAFDRMNHYALFLKLIKRGIPLALLSVMEYWFKLSVTCVRWCGYESPFFRLLAGVRQGGVLSPLLFSIFIDDIVYRVISTKVGCYISHVCVSIFLFADDILLLAPTLFGLQKLLSACEDELEFIDMHLNAVKSVCMRVGARFDASCASIYTHLGVALKWVETCKYLGVYMVSSKTFNCVFDEAKRKFFRAFNALYGRVGRSASDEVVVSLIKAKCLPIMLYGAEVCHLTKYQIRSFDFSINRLFMKIFKTGSISVVHECQVNFNFISVGYLIDIRESKFLYDFSNVNNYICQLFTKHANYRLSELYSLYGVSTVGQLRVAAQIAFASDC

SEQ ID NO: 415 - protein, 975 aa, synthetic construct
MDNCNIITYNMHGFNQGAELVKSYCSNAVSDFMLLQELWLSSDSLYKLDNIAHGYSCFSVSSMDSVLENGLLRGRPFGGLAILVRENHRNLCSLLASNERLIAVVYNDILIINVYFPCSSRLNYKDETLDLLVQIEELLGCFVGDKVVIGGDLNCTLEIESWSSKLIRGFIDDHNFISCNNLPIDVTGTVYTVYTYSNEVLGHYSYLDYFVVSSNLSLSIVSLKIGCDELNLSDHSPVSMEAKNIINVDYKKSNSSCNKGDLIPETCYHNRWDHADTVGYYESTRVGLQPVLEDLRSCLTNLKTVNVSNTKQRMKESIDSVYITILAVLNDAAYRHVPRIKANILKFWWDQELSDLKSKAMASNKVWIEAGRPRSGYIFDVRKADKYKYKSLIKRKQLEIRNNITNDLHDALVQKDTEDFWKVWKSKFPNKKVNKFPLIDGSSDPNIIANKFVDFFSNVCTSEPLAYKNANNDFLNRLQDFMGDSTSNKDTVSVELLEEVLESMSRGKAAGLDNLTIEHIQFAHPIIITILKELFNCFLEVGMVPDGFRDGLAIPLPKNDNASHNVNVDNFRCITISPVISKLFEHCLLRLFSKYFHSNDAQFGFKKKLGCSHAIYSVKQVVDYYVRGGSTVNICTIDISKAFDKVNLFILLGKLMDRNIPNCVIMVLFDWFTNSYITVKWLNVLSLRCQVNSGVRQGGVMSPVLFAIYVDEILDKLNNSGLGCNVKGLTVNSFMYADDLIILSASVTHLQKLINICVDELKSIQLSVNAKKCFCMRIGKRYAVSCNSVVIDNYHVQWTNEIRYLGVYFTAGHLLKFNFVPYKRRFYRCLNCILNKTGIKAINVVLSLTQSYCVPFLLYSVESTNLTATEKLRLASPFKMLFSRLFNSFDAQTIAYCQYYTGYLTLEFVIDQRRLKFLNNICNLNNVVIHSLFRLNGATEISSLIAKYNTNMFDIKSIKYSMWNSFILVNNLGVE

SEQ ID NO: 416 - protein, 975 aa, synthetic construct
MSLTMPANNNLFNFTTVVCNTDVTSKLVIISYNLHGLNQGLHGLRELISKCNPDVLCIQEHWLTPANLYKLKSISSAYSAYGSSAMSDTVSRGPLVGRPFGGTAILVKKKIDSATSNIVCRDRVTSICILDWLIVNVYMPCAGTVDQLLLYSDTIDYIDSVLFECPGLNIFMAGDMNTDLNVFSPISDLVNNFLLRNKLHRCDILFPVSLKYTYMNESLNCSSTIDYMFTSSVYLTVAYTIVDIDVNLSDNVPLISVCLCRPLVQSRDDTIKCPVDVEHFRWDHAPTHLYYEQTRMLLQPILDDVNFLLCTNDTDGKFEINTTNIIYDKIVQALQESANKFIPKRRKNFYKYWWNQELDELKDKAIASCKLWKKARKPRSGPISVKYKQDKSNYKLGIKRAQNADVSFYSNELHDALMRKNGREFWKVWNSKFTKSSDGHLLVDGLSDCAKIANKFADHFKMVCQPFSEKRSTELKAMYDSARANYVGQSIIDDQRVFDVQLISEKIMQMKSGKAAGLDKLSAEHLMYCHPIISVILCKLFNICMLSGHVPSGFGASYTVPIPKVEKSCRSLTVDDFRGISISPVISKVFELCLLDRYQDHLITSDHQFGFKHSIGCRHVIYNVRKTVDHYVNNGSTVNICSIDLSKAFDRMNHYALFLKLIKRGIPLALLSVMEYWFKLSVTCVRWCGYESPFFRLLAGVRQGGVLSPLLFSIFIDDIVYRVISTKVGCYISHVCVSIFLFADDILLLAPTLFGLQKLLSACEDELEFIDMHLNAVKSVCMRVGARFDASCASIYTHLGVALKWVETCKYLGVYMVSSKTFNCVFDEAKRKFFRAFNALYGRVGRSASEEVVVSLIKAKCLPIMLYGAEVCHLTKYQIRSFDFSINRLFMKIFKTGSISVVHECQVNFNFISVGYLIDIRESKFLYDFSNVNNYICQLFTKHANYRLSELYSLYGVSTVGQLRVAAQIAFASDC

SEQ ID NO: 417 - protein, 962 aa, synthetic construct
MDNCNIITYNMHGFNQGAELVKSYCSNALSDFMLLQELWLSSDSLYKLDNIAHGYSCFSVSSMDSVLENGLLRGRPFGGLAILVRENHRNLCSLLASNERLIAVVYNDILIINVYFPCSSRLNYKDETLDLLVQIEELLGCFVGDKVVIGGDLNCTLEIKSWSSKLIRGFIDDHNFISCNNLPIDVTGTVYTYFNEVLGHYSYLDYFVVSSNLSLSIVSLKIGCDELNLSDHSPVSMEAKNIINVDYKKSNSSCNKGDLIPETCYHNRWDHADTVGYYESTRVGLQPVLEDLRSCLTNLKTVKASNTKQRMKESIDSVYITILAVLNDAAYRHVPRIKANILKFWWDQELSDLKSKAMASNKVWIEAGRPRSGYIFDVRKADKYKYKSLIKRKQLEIRNNITNDLHDALVQKDTEDFWKVWKSKFPNKKVNKFPLIDGSSDPNIIANKFVDFFSNVCTSEPLAYKNANNDFLNRLQDFMGDSTSNKDTVSVELLEEVLESMSRGKAAGLDNLTIEHIQFAHPIIITILKELFNCFLEVGMVPDGFRDGLAIPLPKNDNASHNVNVDNFRCITISPVISKLFEHCLLRLFSKYFHSNDAQFGFKKKLGCSHAIYSVKQVVDYYVRGGSTVNICTIDISKAFDKVNLFILLGKLMDRNIPNCVIMVLFDWFTNSYITVKWLNVLSLRCQVNSGVRQGGVMSPVLFAIYVDEILDKLNNSGLGCNVKGLTVNSFMYADDLIILSASVTHLQKLINICVDELKSIQLSVNAKKCFCMRIGKRYAVSCNSVVIDNYHVQWTNEIRYLGVYFTAGHLLKFNFVPYKRRFYRCLNCILSKTGIKAINVVLSLTQSYCVPFLLYSVESTNLTATEKLRLASPFKMLFSRLFNSFDAQTIAYCQYYTGYLPLEFVIDQRRLKFLNNICNLNNVVIHSLFRLNGATEISSLIAKYNTNMFDIKSIKYSMWNS

SEQ ID NO: 418 - protein, 707 aa, synthetic construct
CHVVLGGDFNVDFSRSWTHTALLNSFCVSNGLEPTINHVNSRIDYSYNFNMERFSVLDHFIVSGTVYDQLIDSLTALHDVDNISDHDFILFNMKIDIRYIGAANRVYSVRQSWVKASADDFIRYRLNLSDNLKSIRFPTSAILCPDLHCADSDHISAICQYTQDISDACLSAAKSAIPRTAYSGNHDLVHRIPGWAEVVEPVRQKSLFWHNIWNDCDRPRTGVVADCMRRTRTRYHCAIRQAKKDEESIIRRRFAESLHNNPSRNFWAEVKKIRGNKVSRSRIVDGCTDESIISKKFAEKYRALYTSVPFDHDEMRTISNDVNSRLIDGNMVDNNYVITSQDVTDAVSRLHAHKTDGNIGLSTDHFLHAGIDLHMHVSFLFTCAIVHGCVPADFACSTILPIPKKSNANCSDSDNYRGIALSSVFCKIFDNIVLEKFRDVLETSELQFGFKQSSSTNMCTMILKEAISYYINNNTFAFCTFLDASKAFDRVNYCKLFRLLATRGLPALVVRFIIKLYTANSVCVSWAGFTSDYFNVVNGVKQGGVLSPVLFCIYIDNMLTNLSSCGAGCYIGSNFVGALAYADDVVLIAPTPSAMRKMLAVCDSFALEHNILFNASKSKFVVIAPRNKRLLYKQMCECVFYIGGQKVDSVDSYVHLGHIINSTFVDSEDILHRRNCFVGQANNVLCFFGKLDFDVKISLFKSYCSSF

SEQ ID NO: 419 - protein, 866 aa, synthetic construct
NITVGIATCERFTAIKLANWLLVNVYLPCSGTDQRLLIYSDVLCEVQSLISAHSDCDYLVGGDFNSDLTDAKSHAINHMINDFIVTNNLCRCDVVFPVATKYTYINESLDCSSTIDYMLTSNCDSTIAFNIMDLDLNLSDHLPILVVLALNADLSNATCNANPSVDVTHLRWDHAQINEYYDLTRLGLDPVLCEVTVVINNFHCAPESMVADQIDALYERVVNVLSQCADQCVPKQRKNFFKFWWSQELAELKEKAIASCRLWKEAGRPRNGPINVKYRQDKLLYKKRIREERAEESSSFTNDLHEALLRKSGSDFWKVWNSKFENKSSKIIQVGGTADSNVIVNNFAKHFEEVCQPFTAARNADLKAQYDDVRVNYSTPPVFSDAEIFDAELVGNLLVKMKNGKAAGLDGITSEHLKHSHPSVVVILCKLFNLFIATGHIPISFAASYTVPIPKCDGRSKSLEVNDFRGISISPVISKLFELCVLERYRDYFDTSDHQFGFKKTLSCSHVIYSVRTVIENFISNGSTVNLCALDLSKAFDRMNHYALFIKLIKRKFPVEILQILEHWFCGSKTCVRWGGQVSYFFAMVAGVRQGGVLSPVLFSIFIDDIVNKVKLANVGCYLSNICVSIFLYADDILLIAPTVTGLQTLLTVCEQELLELDMKLNVDKSVCIRFGDQFDASCTDIMSVQGGRLLWVDSCRYLGVYFTSGRVFRCCFHNAKCSFFRSFNAIFSKVGRFASEQVILSLLRTKCLPILLYGLEACPVLKSDKHSLNFTLTRLFMKLFRTGSPAVVAECQLQFNFLPLQYQVDIRTAKFLFRFLNSANSLCILLSVHAKAQLTSILSSYGEDVSSIYDLHVAISDILVA

SEQ ID NO: 420 - protein, 971 aa, synthetic construct
MMAALSNSTHLIGNSNCTGARLVVISYNLHGLNQGMTGIRELIRHVNPDVIMVQEHWLTSDNLFKLSDISDKYFVFGSSAMDARVSAGPLVGRPFGGTAMLIKNSFVNITVGIATCERFTAIKLANWLLVNVYLPCSGTDQRLLIYSDVLCEVQSLISAHSDCDYLVGGDFNSDLTDAKSHAINHMINDFIVTNNLCRCDVVFPVATKYTYINESLDCSSTIDYMLTSNCDSTIAFNIVDLDLNLSDHLPILVVLALNADLSNATCNANPSVDVTHLRWDHAQINEYYDLTRLGLDPVLCEVTVVINNFHCAPESMVADQIDALYERVVNVLSQCADQCVPKQRKNFFKFWWSQELAELKEKAIASCRLWKEAGRPRNGPINVKYRQDKLLYKKRIREERAEESSSFTNDLHEALLRKSGSDFWKVWNSKFENKSSKIIQVGGTADSNVIVNSFAKHFEEVCQPFTAARNADLKAQYDDVRANYSTPPVFSDAEIFDAELVGNLLVKMKNGKAAGLDGITSEHLKHSHPSVVVILCKLFNLFIATGHIPISFAASYTVPIPKCDGRSKSLEVNDFRGISISPVISKLFELCVLERYRDYFDTSDHQFGFKKTLSCSHVIYSVRTVIENFISNGSTVNLCALDLSKAFDRMNHYALFIKLIKRKFPVEILQILEHWFCGSKTCVRWGGQVSYFFAMVAGVRQGGVLSPVLFSIFIDDIVNKVKLANVGCYLSNICVSIFLYADDILLIAPTVTGLQTLLTVCEQELLELDMKLNVDKSVCIRFGDQFDASCTDIMSVQGGRLLWVDSCRYLGVYFTSGRVFRCCFHNAKCSFFRSFNAIFSKVGRFASEQVILSLLRTKCLPILLYGLEACPVLKSDKHSLNFTLTRLFMKLFRTGSPAVVAECQLQFNFLPLQYQVDIRTAKFLFRFLNSANSLCILLSVHAKAQLTSILSSYGEDVSSIYDLHVAISDIL

SEQ ID NO: 421 - protein, 1004 aa, synthetic construct
MASEQINLRDCDSAEKLIVISYNLHGLNQGRPGITELISLLSPDAIMIQEHWLTPDNMYKLDQLSDNYLVFGSSAMNDCVLSGPLIGRPFGGTAIIIKKSLASVTKNIISSDRYNVVKIANWLLFNVYMPCVGTDYREYLYVEILSEFDSLLAANPNCSCLVGGDFNTCLDNPVNVSVTINTFIANNMLHRCDILFPSSNKFTFFNESTHSGTAIDYMLASDPNDIIAFNVLDMDINLSDHHPIMAVCACPKLSIDPSSCQTNLPEIQHFRWDHAQLDNYYEHTRRLLQPVYDELNVLACCHVSLDAMIVADKIDSIYNRFVTALCVSAEKFIPKHRKNFYKFWWSQELDALKEKSIASCRKWKEAGKPRNGPIQAQYKKDKLLYKKCIKEEQAAETCSFTNDLHDALLCKSNQDFWKTWRSKFSNNSNNIIQVDGIADGAAIANNFANFFESNSKPFSDSRNAELKAQYTELRADYCGCPVTDNELFDVELIGKLITEMKNNKAAGLDELTCEHLKFSHPIAICILTQLFNLFIALSHIPSSFGASYTVPIPKCDGRTRAMSVDDFRGISISPVISKVFEMAVLDRFAPYFRTSDHQFGFKRNIGCREAIYSVRNVIETFISNGSTINVCTLDLSKAFDRMNHYALLIKLIERKLPFQLLIVLENWFLISITCVKWNGHVSHFFRLLLGVRQGGVLSPLLFAIFVDDIVIRVKSTHAGCYISLVCCCIFLYADDILLVSPTVSGLQILLNACENELTELDMKINVKKSMCIRFGKRFDVHCAELVSVQGGPILWVDSCRYLGVYFLSGRSFRCSLDDAKSRFFRAFNAIYSKVGHFASETVILNLIRTKCLPILLYATEACPLLSRQKHSLEFTVTRIFMRIFHTGSMDIVKQCQCNFGFLSVSYQLSVRTARFLQKLVASENSLCLLFSRTASDQLAKIFSFFDEDIKTACQLNNFFYTNYCLLALINWVLINRKFIYLFIFFYFFFRFNINLFVLLMSGRC

SEQ ID NO: 422 - protein, 337 aa, synthetic construct
MFIPKHRKNFYKFWWSQELDLLKSKAIESNNAWKCAGKPKNGAIFSQYKQDKLIYKKRIREECFNETKSYTNDLHDALLCKSGQAFWKTWQSKFESKSANVMQVDGTADSDIITDKFAKYFEANCSPFSTERNDEFKKKYTELRLHYSGSPITDDQAFDVELISRLVSNMDKGKAAGLDELSSEHLKFSHPILICILTKLFNLFVFKGHIPTSFGSSYTVPIPKCDGRTRALSVDDFRGISISPVLSKLFELAIFDRFSTYFTTSDHQFGFKKHLSCRNAIYCVRNVVESFGSNGSTVNVCALDLSKVFDRMNHYALFIKLIERDFPTKLLNVLETW

SEQ ID NO: 423 - protein, 903 aa, synthetic construct
YFVFGSSAMSERVASGPLYGRPFGGTAIFINNKYASVTTNLVSSDRYTAIKIANFMLITVYMPSVGTAQRDFLCSELLAELDALLSSNSNSNSNCQFLIGRDFNTNLDSNANVSLAINEFISNNSIYRCDEIFDVADSYTFCNETAHCFSTIDYMLTSCAQDIIAFNVVDMDINLSDHNPILSVCSCCIDTRSVNKNEKSADLYAEFFRWDHAPVDKYYDQTRVLMQPVLDEISSLVINSAYMDKESIAIASDSIYDNLVDAMRSSANLFIPKHRKNFFKFWWSQELDELKEKAIVSCREWKSAGKPKSGVTFQQYLKDKALYKKSIRYEQQREKSCYTNDLHEALLHKNGQDFWKVWKSKFEIGSTNTIVDGLADSAAIANKFAQHLESNCRPFNSERSAALKIQYIDQRAQYCGTPITDCQWFDVELIDRLTREMKNGKAAGLDEISCEHLKFSHPIVVCILSKLFNLFLSTGHIPASFGVSYTVPIPKCDGRTRALTVDDFRGISISPVISKLFEMAVLDRFSHYFVTSDYQFGFKKHLSCSNAIFCVRNVIENFVSRGTTVNVCTLDLSKAFDRMNHYALLVKLMSRKIPDLLLCIFELWFSISVTCVKWDNHFSHFFLLIVGVRQGGVLSPVLFAIFIDSIVDKVKSTNVGCYISLICCCIFLYADDIILIAPSIHALQTLLNACEDELFVLDMCVNVKKSACIRFGTRHDAQCCEIISSFGGSIKWVESCRYLGVFLVSGRNYSCSFHDAKSRFFRAFNAVFGKIGRIASEEVVLSLLKAKCLPILLFATEACPLLSRQKTSFDFTLTRIFMKLFNTGSAVIAKECQNLFNFLPIRMQLSIRTARFLQKFAACENNLCSLFADIAVKQLNVLFSEYNVKTACQLANAIYRKLSETLN

SEQ ID NO: 424 - protein, 613 aa, synthetic construct
MAANLVTISYNLHGYNQGCPGIRELMLKLRPDIFMLQEHWLSPDDLSKLDNISDCYFVFGSSAMLDCVSSGPLVGRPFGGTAFLINKKHVSATSNIESGDRFTVIKIYNWLLINVYLPCVGTPHRDDLYLDILHQLQNIISANSDCSCLIGGDFNVDLDCNSNISLLVNEFMGNNNMHRCDVMFPVSNRNTFVNEATNTGSAIDYILSSTSDNMIAFNILELDVNLSDHLPIMAVCAIDRSFLSLNTHGESYSTDDVTHLRWDHAPLHLYYEHTRLLLQPVLANIDELLESSIAEDDMLYVKGADQIYSNIVNILRESANLYIPKHKKNFYKFWWSQELDLLKSKAIESNNAWKCAGKPKNGAIFSQYKHDKLIYKKRIREECFNETKSYTNDLHDALLCKSGQAFWKTWKSKFESKSANVMQVDGTADSDIITDKFAKHFEANCSPFSTERNDEFKKKYTELRLHHSGSPITDDQAFDVELISRLVTNMDKGKAAGLDELSSEHLKFSHPILICILTKLFNLFLLKGHIPTSFSYSYTVPIPKCDGRTRALSVDDFRGISISPVLSKLFEMAIFDRFSTYFTTSDHQFGFKKHLSCRNAIYCVRSVVESFVS

SEQ ID NO: 425 - protein, 973 aa, synthetic construct
MMAALSNSTHLIGNSNCTGARLVVISYNLHGLNQGMTGIRELIRHVNPDVIMVQEHWLTSDNLFKLSDISDKYFVFGSSAMDARVSAGPLVGRPFGGTAMLIKNSFVNITVGIATCERFTAIKLANWLLVNVYLPCSGTDQRLLIYSDVLCEVQSLISAHSDCDYLVGGDFNSDLTDAKSHAINHMINDFIVTNNLCRCDVVFPVATKYTYINESLDCSSTIDYMLTSNCDSTIAFNIVDLDLNLSDHLPILVVLALNADLSNATCNANPSVDVTHLRWDHAQINEYYDLTRLGLDPVLCEVTVVINNFHCAPESMVADQIDALYERVVNVLSQCADQCVPKQRKNFFKFWWSQELAELKEKAIASCRLWKEAGRPRNGPINVKYRQDKLLYKKRIREERAEESSSFTNDLHEALLRKSGSDFWKVWNSKFENKSSKIIQVGGTADSNVIVNSFAKHFEEVCQPFTAARNADLKAQYDDVRANYSTPPVFSDAEIFDAELVGNLLVKMKNGKAAGLDGITSEHLKHSHPSVVVILCKLFNLFIATGHIPISFAASYTVPIPKCDGRSKSLEVNDFRGISISPVISKLFELCVLERYRDYFDTSDHQFGFKKTLSCSHVIYSVRTVIENFISNGSTVNLCALDLSKAFDRMNHYALFIKLIKRKFPVEILQILEHWFCGSKTCVRWGGQVSYFFAMVAGVRQGGVLSPVLFSIFIDDIVNKVKLANVGCYLSNSCVSIFLYADDILLIAPTVTGLQTLLTVCEQELLELDMKLNVDKSVCIRFGDQFDASCTDIMSVQGGRLLWVDSCRYLGVYFTSGRVFRCCFHNAKCSFFRSFNAIFSKVGRFASEQVILSLLRTKCLPILLYGLEACPVLKSDKHSLNFTLTRLFMKLFRTGSPAVVAECQLQFNFLPLQYQVDIRTAKFLFRFLNSANSLCILLSVHAKAQLTSILSSYGEDVSSIYDLHVAISDILVA

SEQ ID NO: 426 - protein, 388 aa, synthetic construct
AIFDRFSTYFTTSDHQFGFKKHLSCRNAIYCVRSVVESFVSNGSTVNVCALDLSKAFDRMNHYALFIKLIERDFPTKLLNVLETWFCTSITCVKWGRNVSSFFSLHAGVRQGGVLSPILFSVFIDDIVAKVKVANVGCHISTICASIFLYADDVMLVAPSVSGLQSLLTVCENELIKLDMRINIKKSMCIRFGQRFDAPCEELVSIFGGSLKWVSICRYLGVYFVSGRTFKCCFHMAKSQFYRAFNSVFSKVGRAASEEIILVLINAKCMPILMYALEACPLLSRDKHSFQFTITRLFMKLFRTGSTAVVEECQRQFNFLPFKQQLDIRTAKFLQSFLASENSLCLLFEINARLLLNSIFSNYGNTVRTACQLVNKIHEHFFLVRNQD

SEQ ID NO: 427 - protein, 1010 aa, synthetic construct
MDQLRNNVNARSLPGSNALYGSSTVSKEQGPLHRRPDVVKSKQGFPHFRERVWVKKLVHDRRIRFGTWNIGTLTGKSMEIVDVMVRRKINFMCLQETKWTGEKAKELDNSGFKLWYTGKIRSRNGVGIIVDKEWKKDVVDVRRVGDRIIVLKLVVGQDTFNVISGYAPQVGLAEHFKVKFWEDLEGVLQDIPQGEKVFLGGDLNGHVGSVARGFEGVHGGFGLGEMNGEGKSILEFSEALDLSIANTWFKKREEHLITYKSGGTCSQIDFFLIRKSDRKYCLNCKVIPGESLTTQHRVLVMDVRIRDRAKRRSPLVAPRIKWWHLKGEKQGIFQQKIWEGWCGQSQGSANDMWNKMSQEIIKVAKETLGESRGFGPRGKESWWWNENVQSKVRVKKECFKEWSRCRNSETWDKYKIARNETKKAVSEARAQAFDGLYQALGTRDGERSIYRLAKGRERKTRDLDQVKCVKDEEGKVLVHEKDIKERWKVYFHNLFNDGYGYDSSSLDTREEDRNYKYYRRIQKQEVKEALKRMSNGKAVGPDNIPIEVWKTLGDRGLEWLTELFNEIMRSKRMPEEWRRSTLVPIYKNKGDIQNCANYRGIKLMSHTMKLWERVIERRLRKETQVTENQFGFMPGRSTMEAIYLLRRVMEQYRMAQQDLHLIFIDLEKAYDRVPREILWKALEKKGVRVAYIRAIQDMYDRVSTSVRTQGGESDDFPITIGLHQGSTLSPYLFTLILDVLTEQIQEIAPRCMLFADDIVLLGESREELNERLETWRRALETHGFRLSRSKSEYMECKFNKRRRVSNSEVKIGDHIIPQVTRFKYLGSVIQDDGEIEGDVNHRIQAGWMKWRKASGVLCDAKVPIKLKGKFYRTAVRPAILYGTECWAVKSQHENKVGVAEMRMLRWMCGKTRQDKIRNEAIRERVGVAPIVEKMVENRLRWFGHVERRPVDSVVRRVDQMERRQTIRGRGRPKKTIREVIKKDLELNDLDRSMVLDRTLWRKLIHVADPT

SEQ ID NO: 428 - protein, 712 aa, synthetic construct
MVEFWARPDSSKGNKLPLRLPEFALRYTEVRSAIRSTWEEFRGFFPLPHDDDSEAQKRVHWEVESHQWDKCKKKMLVAGAAAYRAVRKVEMAPLCKTKKMWEKRKRRCHSMGLNNPRAAQWKEQEAQAREAYFSLLTSIGRRKKDMAEARAIKYRGKSNTHFLRPSFMSRKRAGITSMSVDGSDNKDMERTSDASIWKTNFNEFYKELYSPKVIDTDVLNDILAETDISLPPRLLTKLRRKAKLSEIEKIIDTLPAGKAPGPDSLPYGVWGILRDTSPMAFCNLFNACMDRGKIVNSARKANIALLPKEPDSFACGMYRPISLTNTDYKIIMRVWADRLGPMLNTVVGGHQLGFIPGRDGRENIINEQFLIDYYQHKGLRGAVVFLDLQKAFDCVSHEALMIIMRHHGWPEEFVGFVENVYMHNTARLIVNGELSEESVKVESGTRQGCPLSPLLFTLVAEMLCQPIINDTGFKGTNMEGGNRKALSAYADDIAINNSCDGDVDIMNDKLDRFKQATGMRVNKKKSEAVLVGGWVKRPPGALLFPCVCKVKYLGCPVGRLTDLDYTNTLEAMEGKLDATFRRWNRAATAPKDRILLAKTMALSKLWYMASVMPWSIQSLRRIQKTTIRYIWGFKSHKVSMAQLQLPKKELGLNMWSLVAKVRALNARWGLHYVTNRLSPNLLNLIQTVYNSPKVGRMDKDREPLEYSGSLPG

SEQ ID NO: 429 - protein, 704 aa, synthetic construct
IKMRPKVLKNLGIKWWALKGEMKLAFREKMFKQDSWNTMEDTNVMWERMAKQIKELGRQVVGESKGQAPFHKESWWWQKEVQDKVNAKRACYKALYKCRNDENKEKYKTARKEAKEAVSKARNVAYEDLYRRLNTKDGEKDIYRLAKARDKKTKDLSNVKCIKDECQKVLVEDEAIRRRWMSYFQQLFNEGVDNEQVRGSLRNMEENKNYEYYRKIREYEVENALNKMKNGKAVGPDEIPIEVWKCLGRKGILWLTSLFNRILKTKKMPEEWRKSILIPIFKNKGDIQNCANYRGIKLMSHTLKLWERVLEQRLRKETSISENQFGFMPGRSTMEAIHLLRMLIERYRSKKQDLHMVFIDLEKAYDRVPREILWRVLALKGIKVAYIQAIKDMYEGATTYVKTPCGVSQEFSISIGLHQGSALSPYLFAIVMDELTKHIQDEVPWCMLFADDIVLVDETRAGINHKLELWRETLEGKGFRLSRSKTEYMEFKFSQQRSRTQEAVRIGDTKVPTSGRFRYLGSILQRDGGIDDDVRHRIQAGWSKWRSATGVLCDRKVPEKLKDKFYRTAIRPAMLNGTECWATKHEHEQKMKVAEMRMLRWICGHSRMDKIRNEVIRERVGVAPIEEKMMENRLRWYGHIMRRDPDAPVRRCAIRDIEIGRRGRGRPRKTWWETIRKDLELLELDESIVNRTQWRNRIHIADPT

SEQ ID NO: 430 - protein, 1018 aa, synthetic construct
MNHLRKIVGASPTQRRAASNPGCSDKWARVARSSSGSDAPHRRPGVVSNEQGFPRLSGRARVKKLAQERRIRLASWNVGSLTGRLAELAEVMCRRKISILCVQETKWVGEKARVVEPWGCKLWYTGVDRSRNGVGIIIDKSLVEDVVEVIRRGDRILLVRLVLGNEILNVISAYAPQVGLDEASKRKFWEDLDEVVQRIPVREKLFIGGDFNGHVGTSRVGFEELHGGYGFGDRNEGGQSILDFALAYDLVVANTWFRKRDSHIITYRSGPSKSQIDFFLARRLDRGCCLDCKVIPGESVVTQHRLLVLDARLSRGCSRSRRRLEPRIKWWRLREATQKTFIEGIVRGADWKCEDDPDTTWTKMTSCIKKVATDLLGESKGSGLPGKDTSWWNDEVKAAIKTKRDCYRDLKRNNDGASFERYKIAKKEAKKAVQQARDRVYKDIYEKRDNKDAERDMYKLARIREKKSRDLGVVKCIKDDRQTVLVHDDQIKDRWREYFDGLFNGDFSQDVGNITVSPIDMNRNFLRRIQRSEVKDALKRMKTRKAVGPDGIPIEVWRVLGEVGVSWLTDLFNKIWRTNKIPNEWRKSTLVPIYKNKGDIQNCSNYRGIKLMCHTMKLWERVIEHRLRQFVLISENQFGFMPGRSTTEAIHLIRQLIERFREKNRDLHMVFIDLEKAYDKVPREVLWWTLVKKRVPVKYINIIKDMYDNVETSVRTCGGLTSAFPITIGLHQGSALSPFLFAIVIDEITRAIQGQVPWCMMFADDIVLIDETRAGVNGKLELWRHTLESRGFRLSRTKTEYLECKFNKRRTPDDSTVKLAGQEIPRSTQFRYLGSILQKDGEIDGDVHHRIQAGWMKWKSATGILCDRNFPLKLKGKFYRTAIRPALLYGSECWAIKQQQVQKMSVAEMRMLRWMCGHTRQDRIRNEVIRTKLGVTSIEEKMRENRLRWFGHVKRRPIDAPVRRVETLDLGQTCRARGRPKKTWMEVIRNDMKLRGVTEDVIHRRNEWRKRIHVADST

SEQ ID NO: 431 - protein, 1018 aa, synthetic construct
MNHFRKIVGASPTQRRAASDPGCSDKWARVARSSPGSDAPHRRPGVVSNEQGFPRLSGRARVKKLAQERRIRLASWNVGSLTGRLAELAEVMCRRKISILCVQETKWVGEKARVEEPWGCKLWYTGVDRSRNGVGIIIDKSLVEDVVEVIRRGDRILLVRLVLGNEILNVISAYAPQVGLDEASKRKFWEDLDEVVQRIPVREKLFIGGDFNGHVGTSRVGFEELHGGYGFGDRNEGGQSILDFALAYDLIVANTWFRKRDSHIITYRSGPSKSQIDFFLARRLDRGCCLDCKVIPGESVVTQHRLLVLDARLSRGRSRSRRRLEPRIKWWRLREATQKTFVEGIVRGADWKCEDDPDTTWTKMTSCIKKVATDLLGESKGSGLPGKDTSWWNDEVKAAIKTKRDCYRDLKRNNDGASFERYKIAKKEAKKAVQQARDRVYKDIYEKRDNKDAERDMYKLARIREKKSRDLGVVKCIKDDRQTVLVHDDQIKDRWREYFDGLFNGGFSQDVGNITVSPSDMNRNFLRRIQRSEVKDALKRMKTRKAVGPDGIPIEVWRVLGEVGVSWLTDLFNKIWRTNKIPNEWRKSTLVPIYKNKGDIQNCSNYRGIKLMCHTMKLWERVIEHRLRQFVLISENQFGFMPGRSTTEAIHLIRQLIERFREKNRDLHMVFIDLEKAYDKVPREVLWWTLVKKRVPVKYINIIKDMYDNVETSVRTCGGLTSAFPITIGLHQGSALSPFLFAIVIDEITRAIQGQVPWCMMFADDIVLIDETRAGVNGKLELWRHTLESRGFRLSRTKTEYLECKFNKRRTPDDSTVKLAGQEIPRSTQFRYLGSILQKDGEIDGDVHHRIQAGWMKWKSATGILCDRNFPLKLKGKFYRTAIRPALLYGSECWAIKQQQVQKMSVAEMRMLRWMCGHTRQDRIRNEVIRTKLGVTSIEEKMRENRLRWFGHVKRRPIDAPVRRVETLDLGKTCRARGRPKKTWMEVIRNDMKLRGVTEDVIHRRNEWRKRIHVADST

SEQ ID NO: 432 - protein, 1018 aa, synthetic construct
MNHFRKIVGASPTQRRAASDPGCSDKWARVARSSPESDAPHRRPGVVSNEQGFPRLSGRARVKKLAQERRIRLASWNVGSLTGRLAELAEVMCRRKISILCVQETKWVGEKARVEEPWGCKLWYTGVDRSRNGVGIIIDKSLVEDVVEVIRRGDRILLVRLVLGNEILNVISAYAPQVGLDEASKRKFWEDLDEVVQRIPVREKLFIGGDFNGHVGTSRVGFEELHGGYGFGDRNEGGQSILDFALAYDLVVANTWFRKRDSHIITYRSGPSKSQIDFFLARRLDRGCCLDCKVIPGESVVTQHRLLVLDARLSRGCSRSRRRLEPRIKWWRLREATQKTFVEGIVRGADWKCEDDPDTTWTKMTSCIKKVATDLLGESKGSGLPGKDTSWWNDEVKAAIKTKRDCYRDLKRNNDGASFERYKIAKKEAKKAVQQARDRVYKDIYEKRDNKDAERDMYKLARIRENKSRDLGVVKCIKDDRQTVLVHDDQIKDRWREYFDGLFNGGFSQDVGNITVSPSDMNRNFLRRIQRSEVKDALKRMKTRKAVGPDGIPIEVWRVLGEVGVSWLTDLFNKIWRTNKIPNEWRKSTLVPIYKNKGDIQNCSNYRGIKLMCHTMKLWERVIEHRLRQFVPISENQFGFMPGRSTTEAIHLIRQLIERFREKNRDLHMVFIDLEKAYDKVPREVLLWTLVKKRVPVKYINIIKDMYDNVETSVRTCGGLTSAFPITIGLHQGSALSPFLFAIVIDEITRAIQGQVPWCMMFADDIVLIDETRAGVNGKLELWRHTLESRGFRLSRTKTEYLECKFNKRRTPDDSTVKLAGQEIPRSTQFRYLGSILQKDGEIDGDVHHRIQAGWMKWKSATGILCDRNFPLKLKGKFYRTAIRPALLYGSECWAIKQQQVQKMSVAEMRMLRWMCGHTRQDRIRNEVIRTKLGVTSIEEKMRENRLRWFGHVKRRPIDAPVRRVETLDLGKTCRARGRPKKTWMEVIRNDMKLRGVTEDVIHRRNEWRKRIHVADST

SEQ ID NO: 433 - protein, 1010 aa, synthetic construct
MDQLRNNVNARSLPGSNALYGSSTVSKEQGPLHRRPDVVKSKQGFPHFRERVWVKKLVHDRRIRFGTWNIGTLTGKSMEIVDVMVRRKINFMCLQETKWTGEKAKELDNSGFKLWYTGKIRSRNGVGIIVDKEWKKDVVDVRRVGDRIIVLKLVVGQDTFNVISGYAPQVGLAEHFKVKFWEDLEGVLQDIPQGEKVFLGGDLNGHVGSVARGFEGVHGGFGLGEMNGEGKSILEFSEALDLSIANTWFKKREEHLITYKSGGTCSQIDFFLIRKSDRKYCLNCKVIPGESLTTQHRVLVMDVRIRDRAKRRSPMVAPRIKWWHLKGEKQGIFQQKIWEGWCGQSQGSANDMWNKMSQEIIKVAKETLGESRGFGPRGKESWWWNENVQSKVRVKKECFKEWSRCRNSETWDKYKIARNETKKAVSEARAQAFDGLYQALGTRDGERSIYRLAKGRERKTRDLDQVKCVKDEEGKVLVHEKDIKERWKAYFHNLFNDGYGYDSSSLDTREEDRNYKYYRRIQKQEVKEALKRMSNGKAVGPDNIPIEVWKTLGDRGLEWLTELFNEIMRSKRMPEEWRRSTLVPIYKNKGDIQNCANYRGIKLMSHTMKLWERVIERRLRKETQVTENQFGFMPGRSTMEAIYLLRRVMEQYRMAQQDLHLIFIDLEKAYDRVPREILWKALEKKGVRVAYIRAIQDMYDRVSTSVRTQGGESDDFPITIGLHQGSTLSPYLFTLILDVLTEQIQEIAPRCMLFADDIVLLGESREELNERLETWRRALETHGFRLSRSKSEYMECKFNKRRRVSNSEVKIGDHIIPQVTRFKYLGSVIQDDGEIEGDVNHRIQAGWMKWRKASGVLCDAKVPIKLKGKFYRTAVRPAILYGTECWAVKSQHENKVGVAEMRMLRWMCGKTRQDKIRNEAIRERVGVAPIVEKMVENRLRWFGHVERRPVDSVVRRVDQMERRQTIRGRGRPKKTIREVIKKDLEINGLDRSMVLDRTLWRKLIHVADPT

SEQ ID NO: 434 - protein, 1010 aa, synthetic construct
MDQLRNNVNARSLPGSNALYGSSTVSKEQGPLHRRPDVVKSKQGFPHFRERVWVKKLVHDRRIRFGTWNIGTLTGKSMEIVDVMVRRKINFMCLQETKWTGEKAKELDNSGFKLWYTGKIRSRNGVGIIVDKEWKKDVVDVRRVGDRIIVLKLVVGQDTFNVISGYAPQVGLAEHFKVKFWEDLEGVLQDIPQGEKVFLGGDLNGHVGSVARGFEGVHGGFGLGEMNGEGKSILEFSEALDLSIANTWFKKREEHLITYKSGGTCSQIDFFLIRKSDRKYCLNCKVIPGESLTTQHRVLVMDVRIRDRAKRRSPMVAPRIKWWHLKGEKQGIFQQKIWEGWCGQSQGSANDMWNKMSQEIIKVAKETLGESRGFGPRGKESWWWNESVQSKVRVKKECFKEWSRCRNSETWDKYKIARNETKKAVSEARAQAFDGLYQALGTRDGERSIYRLAKGRERKTRDLDQVKCVKDEEGKVLVHEKDIKERWKAYFHNLFNDGYGYDSSSLDTREEDRNYKYYRRIQKQEVKEALKRMSNGKAVGPDNIPIEVWKTLGDRGLEWLTELFNEIMRSKRMPEEWRRSTLVPIYKNKGDIQNCANYRGIKLMSHTMKLWERVIERRLRKETQVTENQFGFMPGRSTMEAIYLLRRVMEQYRMAQQDLHLIFIDLEKAYDRVPREILWKALEKKGVRVAYIRAIQDMYDRVSTSVRTQGGESDDFPITIGLHQGSTLSPYLFTLILDVLTEQIQEIAPRCMLFADDIVLLGESREELNERLETWRRALETHGFRLSRSKSEYMECKFNKRRRVSNSEVKIGDHIIPQVTRFKYLGSVIQDDGEIEGDVNHRIQAGWMKWRKASGVLCDAKVPIKLKGKFYRTAVRPAILYGTECWAVKSQHENKVGVAEMRMLRWMCGKTRQDKIRNEAIRERVGVAPIVEKMVENRLRWFGHVERRPVDSVVRRVDQMERRQTIRGRGRPKKTIREVIKKDLELNDLDRSMVLDRTLWRKLIHVADPT

SEQ ID NO: 435 - protein, 1010 aa, synthetic construct
MDQLRNNVNARSLPGSNALYGSSTVSKEQGPLHRRPDVVKSKQGFPHFRERVWVKKLVHDRRIRFGTWNIGTLTGKSMEIVDVMVRRKINFMCLQETKWTGEKAKELDNSGFKLWYTGKIRSRNGVGIIVDKEWKKDVVDVRRVGDRIIVLKLVVGQDTFNVISGYAPQVGLAEHFKVKFWEDLEGVLQDIPQGEKVFLGGDLNGHVGSVARGFEGVHGGFGLGEMNGEGKSILEFSEALDLSIANTWFKKREEHLITYKSGGTCSQIDFFLIRKSDRKYCLNCKVIPGESLTTQHRVLVMDVRIRDRAKRRSPMVAPRIKWWHLKGEKQGIFQQKIWEGWCGQSQGSANDMWNKMSQEIIKVAKETLGESRGFGPRGKESWWWNENVQSKVRVKKECFKEWSRCRNSETWDKYKIARNETKKAVSEARAQAFDGLYQALGTRDGERSIYRLAKGRERKTRDLDQVKCVKDEEGKVLVHEKDIKERWKAYFHNLFNDGYGYDSSSLDTREEDRNYKYYRRIQKQEVKEALKRMSNGKAVGPDNIPIEVWKTLGDRGLEWLTKLFNEIMRSKRMPEEWRRSTLVPIYKNKGDIQNCANYRGIKLMSHTMKLWERVIERRLRKETQVTENQFGFMPGRSTMEAIYLLRRVMEQYRMAQQDLHLIFIDLEKAYDRVPREILWKALEKKGVRVAYIRAIQDMYDRVSTSVRTQGGESDDFPITIGLHQGSTLSPYLFTLILDVLTEQIQEIAPRCMLFADDIVLLGESREELNERLETWRRALETHGFRLSRSKSEYMECKFNKRRRVSNSEVKIGDHIIPQVTRFKYLGSVIQDDGEIEGDVNHRIQAGWMKWRKASGVLCDAKVPIKLKGKFYRTAVRPAILYGTECWAVKSQHENKVGVAEMRMLRWMCGKTRQDKIRNEAIRERVGVAPIVEKMVENRLRWFGHVERRPVDSVVRRVDQMERRQTIRGRGRPKKTIREVIKKDLEINGLDRSMVLDRTLWRKLIHVADPT

SEQ ID NO: 436 - protein, 1010 aa, synthetic construct
MDQLRNNVNARSLPGSNALYGSSTVSKEQGPLHRRPDVVKSKQGFPHFRERVWVKKLVHDRRIRFGTWNIGTLTGKSMEIVDVMVRRKINFMCLQETKWTGEKAKELDNSGFKLWYTGKIRSRNGVGIIVDKEWKKDVVDVRRVGDRIIVLKLVVGQDTFNVISGYAPQVGLAEHFKVKFWEDLEGVLQDIPQGEKVFLGGDLNGHVGSVARGFEGVHGGFGLGEMNGEGKSILEFSEALDLSIANTWFKKREEHLITYKSGGTCSQIDFFLIRKSDRKYCLNCKVIPGESLTTQHRVLVMDVRIRDRAKRRSPLVAPRIKWWHLKGEKQGIFQQKIWEGWCGQSQGSANDMWNKMSQEIIKVAKETLGESRGFGPRGKESWWWNENVQSKVRVKKECFKEWSRCRNSETWDKYKIARNETKKAVSEARAQAFDGLYQALGTRDGERSIYRLAKGRERKTRDLDQVKCVKDEEGKVLVHEKDIKERWKAYFHNLFNDGYGYDSSSLDTREEDRNYKYYRRIQKQEVKEALKRMSNGKAVGPDNIPIEVWKTLGDRGLEWLTELFNEIMRSKRMPEEWRRSTLVPIYKNKGDIQNCANYRGIKLMSHTMKLWERVIERRLRKETQVTENQFGFMPGRSTMEAIYLLRRVMEQYRMAQQDLHLIFIDLEKAYDRVPREILWKALEKKGVRVAYIRAIQDMYDRVSTSVRTQGGESDDFPITIGLHQGSTLSPYLFTLILDVLTEQIQEIAPRCMLFADDIVLLGESREELNERLETWRRALETHGFRLSRSKSEYMECKFNKRRRVSNSEVKIGDHIIPQVTRFKYLGSVIQDDGEIEGDVNHRIQAGWMKWRKASGVLCDAKVPIKLKGKFYRTAVRPAILYGTECWAVKSQHENKVGVAEMRMLRWMCGKTRQDKIRNEAIRERVGVAPIVEKMVENRLRWFGHVERRPVDSVVRRVDQMERRQTIRGRGRPKKTIREVIKKDLELNDLDRSMVLDRTLWRKLIHVADPT

SEQ ID NO: 437 - protein, 972 aa, synthetic construct
MKSKQGFPHFRERVWVKKLVHDRRIRFGTWNIGTLTGKSMEIVDVMVRRKINFMCLQETKWTGEKAKELDNSGFKLWYTGKIRSRNGVGIIVDKEWKKDVVDVRRVGDRIIVLKLVVGQDTFNVISGYAPQVGLAEHFKVKFWEDLEGVLQDIPQGEKVFLGGDLNGHVGSVARGFEGVHGGFGLGEMNGEGKSILEFSEALDLSIANTWFKKREEHLITYKSGGTCSQIDFFLIRKSDRKYCLNCKVIPGESLTTQHRVLVMDVRIRDRAKRRSPMVAPRIKWWHLKGEKQGIFQQKIWEGWCGQSQGSANDMWNKMSQEIIKVAKETLGESRGFGPRGKESWWWNENVQSKVRVKKECFKEWSRCRNSETWDKYKIARNETKKAVSEARAQAFDGLYQALGTRDGERSIYRLAKGRERKTRDLDQVKCVKDEEGKVLVHEKDIKERWKAYFHNLFNDGYGYDSSSLDTREEDRNYKYYRRIQKQEVKEALKRMSNGKAVGPDNIPIEVWKTLGDRGLEWLTELFNEIMRSKRMPEEWRRSTLVPIYKNKGDIQNCANYRGIKLMSHTMKLWERVIERRLRKETQVTENQFGFMPGRSTMEAIYLLRRVMEQYRMAQQDLHLIFIDLEKAYDRVPREILWKALEKKGVRVAYIRAIQDMYDRVSTSVRTQGGESDDFPITIGLHQGSTLSPYLFTLILDVLTEQIQEIAPRCMLFADDIVLLGESREELNERLKTWRQALETHGFRLSKSKSEYMECKFNKRRRVSNSEVKIGDHIIPQVTRFKYLGSVIQDDGEIEGDVNHRIQAGWMKWRKASGVLCDAKVPIKLKGKFYRTAVRPAILYGTECWAVKSQHENKVGVAEMRMLRWMCGKTRQDKIRNEAIRERVGVAPIVEKMVENRLRWFGHVERRPVDSVVRRVDQMERRQTIRGRGRPKKTIREVIKKDLEINGLDRSMVLDRTLWRKLIHVADPT

SEQ ID NO: 438 - protein, 827 aa, synthetic construct
LEGVLQDIPQGEKVFLGGDLNGHVGSVARGFEGVHGGFGLGEMNGEGKSILEFSEALDLSIANTWFKKREEHLITYKSGGTCSQIDFFLIRKSDRKYCLNCKVIPGESLTTQHRVLVMDVRIRDRAKRRSPLVAPRIKWWHLKGEKQGIFQQKIWEGWCGQSQGSANDMWNKMSQEIIKVAKETLGESRGFGPRGKESWWWNESVQSKVRVKKECFKEWSRCRNSETWDKYKIARNETKKAVSEARAQAFDGLYQALGTRDGERSIYRLAKGRERKTRDLDQVKCVKDEEGKVLVHEKDIKERWKAYFHNLFNDGYGYDSSSLDTREEDRNYKYYRRIQKQEVKEALKRMSNGKAVGPDNIPIEVWKTLGDRGLEWLTELFNEIMRSKRMPEEWRRSTLVPIYKNKGDIQNCANYRGIKLMSHTMKLWERVIERRLRKETQVTENQFGFMPGRSTMEAIYLLRRVMEQYRMAQQDLHLIFIDLEKAYDRVPREILWKALEKKGVRVAYIRAIQDMYDRVSTSVRTQGGESDDFPITIGLHQGSTLSPYLFTLILDVLTEQIQEIAPRCMLFADDIVLLGESREELNERLETWRRALETHGFRLSRSKSEYMECKFNKRRRVSNSEVKIGDHIIPQVTRFKYLGSVIQDDGEIEGDVNHRIQAGWMKWRKASGVLCDAKVPIKLKGKFYRTAVRPAILYGTECWAVKSQHENKVGVAEMRMLRWMCGKTRQDKIRNEAIRERVGVAPIVEKMVENRLRWFGHVERRPVDSVVRRVDQMERRQTIRGRGRPKKTIREVIKKDLELNDLDRSMVLDRTLWRKLIHVADPT

SEQ ID NO: 439 - protein, 1010 aa, synthetic construct
MDQLRNNVNARSLPGSNALYGSSTVSKEQGPLHRRPDVVKSKQGFPHFRERVWVKKLVHDRRIRFGTWNIGTLTGKSMEIVDVMVRRKINFMCLQETKWTGEKAKELDNSGFKLWYTGKIRSRNGVGIIVDKEWKKDVVDVRRVGDRIIALKLVVGQDTFNVISGYAPQVGLAEHFKVKFWEDLEGVLQDIPQGEKVFLGGDLNGHVGSVARGFEGVHGGFGLGEMNGEGKSILEFSEALDLSIANTWFKKREEHLITYKSGGTCSQIDFFLIRKSDRKYCLNCKVIPGESLTTQHRVLVMDVRIRDRAKRRSPLVAPRIKWWHLKGEKQGIFQQKIWEGWCGQSQGSANDMWNKMSQEIIKVAKETLGESRGFGPRGKESWWWNENVQSKVRVKKECFKEWSRCRNSETWDKYKIARNETKKAVSEARAQAFDGLYQALGTRDGERSIYRLAKGRERKTRDLDQVKCVKDEEGKVLVHEKDIKERWKVYFHNLFNDGYGYDSSSLDTREEDRNYKYYRRIQKQEVKEALKRMSNGKAVGPDNIPIEVWKTLGDRGLEWLTELFNEIMRSKRMPEEWRRSTLVPIYKNKGDIQNCANYRGIKLMSHTMKLWERVIERRLRKETQVTENQFGFMPGRSTMEAIYLLRRVMEQYRMDQQDLHLIFIDLEKAYDRVPREILWKALEKKGVRVAYIRAIQDMYDRVSTSVRTQGGESDDFPITIGLHQGSTLSPYLFTLILDVLTEQIQEIAPRCMLFADDIVLLGESREELNERLETWRRALETHGFRLSRSKSEYMECKFNKRRRVSNSEVKIGDHIIPQVTRFKYLGSVIQDDGEIEGDVNHRIQAGWMKWRKASGVLCDAKVPIKLKGKFYRTAVRPAILYGTECWAVKSQHENKVGVAEMRMLRWMCGKTRQDKIRNEAIRERVGVAPIVEKMVENRLRWFGHVERRPVDSVVRRVDQMERRQTIRGRGRPKKTIREVIKKDLEINGLDRSMVLDRTLWRKLIHVADPT

SEQ ID NO: 440 - protein, 555 aa, synthetic construct
QLPPTDLIAHEIPLKLGAKPHAAKAGLYTKDEMKWMEEKFPRLQDGGVICLCSSPWSSKVKFVAKKTGKLRMVNVFVPLNNATEKVTYPMVRQEQVLDTVFKPGYNVYFTCDGSNAYWGIPIVERDQYKTAFNTPFGQFCMRRMGQGLTGAPFTYARFANTVFGPISETTPGAGDGEEQLDGDHSGANVLKSDAQRNIEQSEGQLGFNFSHFIDDTYGSTASFDEMASFLHRKFFPRIHFARMCLNAEKSEFFMPAITILGYRGGSEGIAPEERKKKLFQHYPVPTNAEELEAFCYLTPYLRRFIPGRAEHVRILKEALVEEKAKVSTATGEKEITKYMFIWTDRQQRSFESICQAIIKNTIFPVNPTLQVHVAADASQRGMGAVVFQLPGHPVGTKLTLSNRKDMRIIEYISQKFTPAESRYTNSEREAVALVKALREARLVVLGSPYPILAYTDHSTLTTLLNSDSVKGRIANWQTQLSEYDLRIVHILAKEMVLADGLSRLPDKVMESPSPEPDEDPEAQGLHLLRHDEGVQEVKDNYRCEVERTGARWIAS

SEQ ID NO: 441 - protein, 678 aa, synthetic construct
DKVFPTKNGAPRIMTEFVDRPYKFELRDEYTTGRNPRPLPSIKAMYYHGKPATQKVLEHFVRSTPVVSRCDNPRCLSRLVIVPKRDPGALKSADPTSYRVTMNALINECLKPTPSTLPLALNEIKKLHHYKYFLKVDAANAYWSIPLDDESRRMTAFQTHEGVFAWDRLTMGTRPASTVQQTAYYRAFDRYLPKELRHRYATFADDVAAGADTLEELFDLLKAIVICFQKAGIQVKASKLIFGVTEISFHNYTISKDQTRPKDENLDPIKNCAIPENVTNVKAFLGCTQQMAHYCQYYGLVAAPLHELTRDKVVFPKPWLAGTAYDISFNRLKSMMLNENLFLWNKVSGRRLFIEVDACDMQHEDEGRHRLLSKEPKRVVEWMSKAWTAHERELPCFYREALARLLCLEHFRNLIETQDVNAGTTIYTDHAPSTYKGSLSNKGRLSSWRIHETQDLADMVQTLYKAGAHLSPPHGLADSLSRLPRGQGFYRLQLPAVLDILLENLPTSVKELPNIRVNAEKDTVLAARIVQRWRKPRNPISIVRADAAGPCDFVILAPFADKITHKIASLIKMNRPFAALVPIDLLQEIDRGANCKVDEEVRKRRKQMPCIIISPLSLAWLVSHPEHTLLEKPSLVLFSQQSKEGTVTESGVLQSPDPSQDYLDFVDKSLMSLDALMK

SEQ ID NO: 442 - protein, 698 aa, synthetic construct
DKVFPTKNGAPRIMTEFVDRPYKFELRDEYTTGRNPRPLPSIKAMYYHGKPATQKVLEHFVRSTPVVSRCDNPRCLSRLVIVPKRDPGALKSADPTSYRVTMNALINECLKPTPSTLPLALNEIKKLHHYKYFLKVDAANAYWSIPLDDESRRMTAFQTHEGVFAWDRLTMGTRPASTVQQTAYYRAFDRYLPKELRHRYATFADDVAAGADTLEELFDLLKAIVICFQKAGIQVKASKMIFGVTEISFHNYTISKDQTRPKDENLDPIRNCAIPESVTNVKAFLGCTQQMAHYCQYYGLVAAPLHELTRDKVVFPKPWLAGTAYDISFNRLKSMMLNENLFLWNKVSGRRLFIEVDACEYAFDLSLGACAYQYADEPTDMQHEDEGRHRLLSKEPKRVVEWMSKAWTAHERELPCFYREALARLLCLEHFRNLIETQDVNAGTTIYTDHAPSTYKGSLSNKGRLSSWRIHETQDLADMVQTLYKAGAHLSPPHGLADALSRLPRGQGFYRLQLPAVLDILLENLPTSVKELPNIRVNAEKDTVLAARIVQRWRKPRNPISIVRADAAGPCDFVILAPFADKITHKIASLIKLNRPFAALVPIDLLQEIDRGANGKVDEEVRKRRKQMPCIIISPLSLAWLVSHPEHTLLEKPSLVLFSQQSEEKTVIESGESQFPDPSQDYLDFVDKSLMSLDALMK

SEQ ID NO: 443 - protein, 691 aa, synthetic construct
DKVFPTKNGPPKILTMYKDKPYEYELRNEFKSGSLQLPTVRSFDWDGKPATSKIIRDFIASTPVVSPCAHPRCISRLVIVPKLDPGQSKESLEHGFRVTVNALFNKCLKPAASTIPLATSEIKKLHNKKFFAQIDGLSAFWSIPVGEESKRLTAFHTPDGIYCWDRLLMGARPSSAVQQSAYLKALDDWADKIYHEHFPTEKDKHGLGPSIRARYASYCDDLACGADTLEQLYVLFFVLIEVCAKAGIQVKASKAKFGVEEITFHNYLINSTSTRPKQANLCPIRNFGIPRDVHQVKSFLGMAQQLSQYIELYSIIAHPLHALTKGDGSKFPKPWITGSPYDLAFHRLKAALLDPNRFLWHKEKSKRLFIECDASDLGFGAAAYQYANVISEVGEEEGLARLKDTSYKRVVEWMSKAWSTDQLKLPVFYRESLARLIVLEKFRNLIESNYELGTTVYTDHLPALFKSSLSNKGQLSEWRINEVQDLNSIVQTLYKKGPLLVLSDALSRCCQPETDLYDNDMPRKLAVLLDRLPDRIKHCKHIRVHYNKDTAAAGRIVQRWRTPKNPVSPVAPASTTLVDFVIAFPLDKGTLTIKDMLLRGQHFAMLIPVSTLCKIAQCPATCAILPHVQTMVDARPKIIIISAENLVWIMHFGDNNDCVQAQILLNAHGPIDDGNFGCGHEEAIEIMNARA

SEQ ID NO: 444 - protein, 553 aa, synthetic construct
DSVFPTKNGSPKILTKFIDHPYSYELLPEYERGEKKMPCTKAMNWEGKTYSSLVIRGFIRGTPVVEKCSNPRCISRLVIVPKLAPGQSKTDPNHGFRVCVNALVNKFLKPCASTIPLAADEITKLFNCKYFLQLDGMNAYWSIPVCEESKRLTAFHTPDGVYCWNRLLMGAKPSSAVQQSAYLEALDQYIDYDHNGQVRQCLLDKDGKRLLDSNGSPKTLRHKFAVYCDDIAAGANTLEELYDLYEALLCCCAKAGIQVKAAKIKFGVREVTFHNYTISEHGMKPKDANLCSIRNLGIPTDVTQVRAFLGCAQQMAGYCKELQIISAPFHKLTKKTTQFPKPWLSGVDYDLAFHRVKALLLDEKLYLHHNDPSKILFIEVDASDVGWGACAYQMRVPFEGDPKDEARMRVGDTGPRNIIQWVSKAGQIMNQGWTDHELKLPVFYRETLARLLVLERFRNLIETNISAGAALYTDHKPGLFEESLSNKGQLSAWRIVETADLQSIVEHHYRQGPKMLLADPLSRICAPSSGFYDPSLPSKFQALTKYLPESIKQ

SEQ ID NO: 445 - protein, 743 aa, synthetic construct
NSVFPTKNGSPKILTKFVNHPYSYELLPEYERGEKKMPCTKAMNWEGKTYSSLVIRNFIRGTPVVEKCSNPRCISRLVIVPKLAPGQSKSDPNHGFRVCVNALVNKFLKPCASTIPLATDEITKLFNCKYFLQLDGMNAYWSIPVCEESKRLTAFHTPDGVYCWNRLLMGAKPSSAVQQSAYLEALDQYIDYDWDGNIRKCLLDKHGKRLLDSNGSPKTLRHKFAVYCDDIAAGANSLDELYDLYEALLCCCAKAGIQVKASKVKFGMKEVTFHNYTISEHGVTPKDANLCSIRNLGIPSDVTQVRAFLGCAQQMAGYCKELQIISAPLHKLTKKATQFPKPWETGTDYDIAFHRVKALLLDERLYLHHKNPLKILFIEVDASDVGWGACAYQMREPFEGDPKDEARMRVGDTGPRNIIQWVSKAWSDHELKLPVFYRETLARLLVLERFRNLIETNITAGAALYTDHKPGLFEESLSNKGQLSAWRIAETADLQSIVEHHYRQGPKMLLADPLSRICAPSSGFYDPSLPSKFQALAKHLPESVKNIKTIRLYANKDTAALSRHVQAWRTPTNPISQGRLGSTEFVDNSNVFFIGVCHAEKSVDEIKELLSSDKQFAVLLPTGLLSEISRGENDDDKETFNSVIEKQIHSLSKIVLSQEGETWLIRVNDQPRIVEVLTAEQVGCDEVDATCIFESSLEELITQVTILPDWQEHNSEIAEERETHVGEACSPPAARRSSRNKRA

SEQ ID NO: 446 - protein, 506 aa, synthetic construct
GYTGQRDSRCTVVRANHPSAELPFAKELIDAEIAGELAKGRMAGPFALPASAQHRRQRGDHMWSSPAVPFAFFMTSPVAVVPKPGGDGWRIIDDLSKGDNAVNASIDEKVVKLRYEQFQAALDMVVKLGRGCELAKIDWKSAFRQIAVHADDCCVLGISWRGKLFFRLVLPFGIRSAPFLFTEYAAALIWKMRSLGFDVTYYLDDILLGGAKGTGKCAAAVAELERLGAKLGIQYHPTKRDGPTTTIVFRGIGIDTIRMVLFIPEDKVVKANRAIAAVLSAHNRHAFLKQLQKCVGLLNFLAMAVPNGRAMMRRLYAFFKKKYAESAEEFTIPVEVWEDLVWWQQCVQFTHQRTIFPIVAAEDSFQIHTDACQTGGGAVLFDRSFRIVGWFAFPWRSLPLSESMMASMPALEAFAFVVALLTFSPAIAGRRLLLSSDALTAVDALAWESSSSQHLTVLLRVAYATAINSSVLLRVVHIQGTRNILADKASRLFVDDDVQAMQQRRQ

SEQ ID NO: 447 - protein, 567 aa, synthetic construct
VSLDYDGQRTATVVNKNSTRQLVYNKNGLPSDPIPEYATSATKLLNVISHEVQEKLYLGPFTREEAEKKFGIFISSSIFGIEDLSRSTTKIRLIHNLSSSFFSVNNFVETEFTHTLDYTKLFFEALHNVANLSPSVWFACLDISRGYRRFRVRHQDIPLQGLSVPITTTTTVPSFDGTTSGVRQLLQGAEYFYFDTAMPFGARSAPQNFCTVSIAIRDLVRELAANGSIPGYLLTYVDDFSALAPTEADASYFLDTLRAILTEVNLPENPSKAQPSSLMTQYLGLEYDGVKLTATLPKLKRQLYIKYLQYFIDTRRIKWSDLNSLVHRLRHAASVLRAGKPFFSNLLVKLKSSKANANHYVTLSDRDRDDIRWWLHLLRHHKPQVVIGPSHWSSLESVGLYTDASKRGFGAYFTFNGSYFNGPFTPLEIAAFESNQVSIAEFELVVLCFAISTWGHLLAGKRLTFYCDNLPSVYSVNSQSSTIIVRVALLRHLFAIAAIHSIDVQSIWLGTKTNIIADSLSRFDMKTFHRLTKNVHTKQHQHPILTSRALLLTPDGRENPSNPEWRP

SEQ ID NO: 448 - protein, 709 aa, synthetic construct
VALEYDGQRDDTVVCKTRSKGLIVQKGAMPDAEVPDPITSAAALLNVVNKGVTNKTYMGPFNREEAIEKFGVFIASEVFGIEDTTRSTTKIRLIHNLSSRLFSVNDFVSGEFSHTLDYTKMFFAALSDIAATTPAVWFGCLDISRGYRRFRTRHQDIPMQGLNLPILSSSSVPFFDGDTTSTRHVAAGDELFWFDVTMPFGSRSAPRHFCAVSIAVRDIVREIALNAGVPGSILCYVDDFAALAPTKEAASFFMATLRSLLLAIGLPEEPSKAQPVSTTIRYLGVDYDGELCTATLPQVKRELYIRYLSYFVATTRRIKWKHLDQVVHRLRHAASVLRAGKPFFSSLLQTLRSRAHGSGGAARLERATGLRHGRVQHRGAYIKLSSTDKDDMRWWIHILSHHPPMTVIGPDHWITAADASIYTDASKLGFGAFFNGRWFNGSFTPTEIAAFEAQTVTINEFELLAVVFAISTWAHLLTARRILFYCDNSASVASVTTQQSRVPVRSALLRHLYAIAAIHSIDLKIVWLGTKTNIIADALSRFDIPLFQKITQDRFMLHHENEPALASRLLLFDPAGPQNPSSPEWRPMASISALSKQGSSAPLPPPLPLPLPHPLPHPLSPHPLNHHPLPAPTPLDCFETEEDALLHEFFKLVFTTEKMVSSHPSDWKSRSPSLPANVRAATFLALSDGQDFLLDMHLAKGSRALRHRA

SEQ ID NO: 449 - protein, 514 aa, synthetic construct
FTHKPYQKLVPHPYRFSSEIEDKIDKKINKYLEQNIMELADHENGEFISNIFFKEKPDGDIRILLNLTECNEYIPDRHFKMEEVRTVMSLIKQNCYMASVDFKDAYYCVRVHPKYRKYLRFFWKGKLIQYTCLPNGVKCAPRKFTKTTKPVIRKARENEASVSSFLDDTFIEGDNLLEAQKNVMTTVKIAEKAGFIPHPVKSQLDPKQILDHLGFTFNSLNMTVKITHKRLLKILEMCKNLIKKYQNKSHIKIREIASLSGSLVATFPGNQYGKLMYRKIDNFKNAKLRQNHINYSAKVMLNYNIAKEIEKVITELPSAYAPIIRENPDIILESDSSDIGWGGCFGDKNETGGSWTKSEIDSKNNYLELKAACFTILCFCKNIKNKHILIKSDNTTAVAYLNNQGGRIFKLNVLANEVWSWAQQTHNFITAEYLPGEENFRADKISRTMQSNIEWSLDQEIFTEITKEFGDPSIDLFASRLNNKKPDYFSWKPDPHAKNTNAFLQKWGTKLAYA

SEQ ID NO: 450 - protein, 511 aa, synthetic construct
QFCPNPSFPSPVISCPSCPLKYKALKDQINEYLSSGAITKVDPDESQILSRIFSVKKSNGKNRTILDLSKINTQIIHVSFKMETYINIMEIIQPRDYLASIDLRDAFFAVNLHNDSKRFCCFEFNGDRFQFEVLPFGLTCSPRIFSKVLRPAIIHLRSLGIRILSYLDDIFLCATSVSLLYEHIQLTLNLLISLGYAPNFEKSNLTPSNELMHLGFIWNSSNMTISIPSEKILKVQKFASSILRSSPTLRTLSSFLGLLVSFRPGYFLSPLHYRNLQLQLCALIKRGYNWDDKVTLNEKSVTDISWWSSCPNPLPSFYFGIFIPDVTLSTDSSLTGWGGVLSSGQSVKGSWSTSESKNHINFLELKAIEFCIRSFLPIIRNKSLSIQSDNMTSVFYMNKVGGTHSKPLCLLALSIWQLLMDNNISCKTFHIAGSDNINADFYSRSTKLDNDYSLTQYAFNSLLSHISFTPTLDLFASRLTHKLKSYISYHFDPFSVSSDAFTLKWPNNIYL

SEQ ID NO: 451 - protein, 509 aa, synthetic construct
PFAEYPPSCFLANNRSAFQHPDFVTQAISELLANGCIVEHSVPPFCVNPLSVAEGKKLRLVIDLRHVNSFLVRFKFKYEDLRSLSQVLEEGQWFFTWDLKSGYHHVDICLEHQMYLGFSWPFSGMLRYFTFTVLPFGLSSACFCFTRLLRPLVSRWRSMGHNSFIYLDDGLGSHPDKCSAAAAAMIQKKELNSAGLLVNEEKFHWHPMQVGEWLGLVINTITMSFHIPERKVEKLKSLLSSAIGDASSSYRELARIAGSIIYVALAVGPISRLLTRQMYLAIESRSAWDHTLRFSPALLEELRFWYNNIDSFNGYSLRPPPDSSMVVFSDASDVAFGGFSASLDGVVASGMFTSEDLSQSSTYRELKAIYYVLLSCAEQLRQKRVKVLTDNQGAARIVSVGSSKVHLQSVAMSIFDLCLSNRITLEAQWIPRSQNEKADLLSRFVDKDDWCVNPSVFRLLDAKRGPHTFDRFATYYNAQLPRFNSKFASPGCSGVDALAQDWSSENNWI

SEQ ID NO: 452 - protein, 517 aa, synthetic construct
PFFELPTPFLKANNASALSNSSFVSKAVNELLQANLVEEIFCVPDIVNPLSVSTRSFGKQRLILDLRHVNSFIFKQRFKCEDLSVAIQIFDQGFHLFKFDLKSGYHIEIFPAHQKFLTFAWDFGTGSLRYFQFCVLPFGLSSAPFIFTKMFKPLLKSWRSRGIPIAIFLDDGLGGGTDPVSAKINSLVVHSDLLKSGFVPNEDKSQWEPIQIITWLGVILNTIDGSIKATDERIAKLSHDLETLSTHQHPTRVHVKCVASIAGQIISLSSCVGPVARIMTRFLFSAISSAVSWDCEVLLTQDAISEIDFWRHNVHALNGKVYWGAKSLPAKITFSDASDSACGAFVQLQPGVELVSHKNWSIAESAQSSTWRELKAVCLALEAFASHLSCSKVVWYSDNQNVASILLNGSRKADLQLLAIQAFHICLQFRISLVPQWIPRDLNSRADLISRLIDFDDYELNDVIFQGLDELWGPHTVDRFACNYNAKLPRFNTKFFQPGSEAVDAFCQDWRFNSNWL

SEQ ID NO: 453 - protein, 517 aa, synthetic construct
PFFELPTPFFKANNASALSNGSFVSKAVNELLHANLVEEIFCVPDIVNPLSVSTRSFGKQRLILDLRHVNSFIFKQRFKCEDLSVAIQIFDQGFHLFKFDLKSGYHIEIFPAHQKFLTFAWDFGTGSLRYFQFCVLPFGLSSAPFIFTKMFKPLLKSWRSRGIPIAIFLDDGLGGGTDPVSAKINSLVVHSDLLKSGFVPNEDKSQSEPIQIITWLGVILNTIDGSIKATDERIAKLSHDLETLSTHQHPTRVHVKCVASIAGQIISLSSCVGPVARIMTRFLFSAISSAVSWDCEVLLTQDAISEIDFWRHNVHALNGKVYWGAKSLPAKITFSDASDSACGAFVQLQPGVELVSHQNWSIAESAQSSTWRELKAVCLALEAFASHLSGSKVVWYSDNQNVASILLNGSRKADLQLLAIQAFHICLQFRISLVPQWIPRDLNSRADLISRLIDFDDYELNDVIFQGLDELWDPHTVDRFACNYNAKLPRFNTKFFQPGSEAVDAFCQDWRFNSNWL

SEQ ID NO: 454 - protein, 516 aa, synthetic construct
PFYYTPTSVHLLNNKSALNYSDFVVNAITELLKVGSVVECPFPPVVVNPLPVSVQSNGKKRLILDLRHVNFFVKKSKIKFEDAKSFLECLLARPTAWACSFDIKSGYHHIEIFESDQQFLGFSWVFKGVTKYFKFTVLPFGLSLGPYIFSKVMRPLVKYWRSKALSIVVYLDDGISAAQSFSKCEEHSLLVRSDLFKSGFVPNKDKCQWVPIQVICWLGIFWDFKNNRMFIPPEKISRIFHELVEVMSCRSVSARKLVRVTGRIISNFLIMGDVCKLMTKAMHRLIERRNGWDAHVVLDSDVLIELKFWREHLQSLNCRPIWRKHTLPSRVVYSDASAVGCAAFISMNDRPVSHKNWDAIEIKQSSTWRELMAMCVKHSLQSFVHLLKGGHVKWYTDNQGVAAIVKSGSTKVHLHKLAMEMFSLSKEHDVRIDIEWIPRSDNEVADYLSKIVDFDDWSVKDSYFQAVDSTWGPFTVDCFANSVNAKVSRFYLLFFQPGSLGVDSLAFDWGQENCWL

SEQ ID NO: 455 - protein, 509 aa, synthetic construct
PFTCTPPPMKFKNYKSAIENNVFVDEAVSEFINNGCIQEVPFQPFVVNPLSVAIQKSGEKRIILDLSELNVYVAKNKIKFEDWKVALQFFERDCYMFKFDLTSGYFHLDICIEQQTYLGFSWNNTFYCFSVLAFGLTSAPYIFTKCLRPMVKYWRENGVNIVLYLDDGFDLAEGYLECKNKSDFVKLSLKQAGILVNEGKYIFEPVQSLEWLGLIWNSKAFSLKIPERRISDTIESLEKLLKLFPYISALTIITICRLSNFNVACNGQCYYFNDETFVFCYRKQTSWDSRLKVSDTNFVFEELLFWSGNLCTLNQNTLLNDSLPCTIVYSDASNVAGGAYTVEMNEKVFHQMWDEFEKNMSSTWRELMAIHVALHSFKSELQNKRVKWHTRQSELCIINKGSTKKHLQYLAYDIFKICSNVGITLNPIWIPRSENCKADFISKMIDIDDWQTSLEFFSFMNQLWGPYTVDRFANFYNAKLVRFNSKFWNPGSEAVDAFSQDWNNENNWI

SEQ ID NO: 456 - protein, 586 aa, synthetic construct
QWATGSPPRPFSQAPRLVDEAHCAWLLDKIQEGLETGAHGPLPLRRGRPDARWLSPAHVTTSAGKHRLVVAYTRLNDACQSATCRYETIEHLVDLLTPSSWLFSCDLSAAYHHCAIHKSHRKYTGFHFALPYRARGQILPLQVGGYYVYAPGASAATEPLYQVVELCAYALNFGARASPLVFTKHMRTLVKYLRKHAIGVVIYLDDLAFVVEGSQQAALRARDFIEQCIRSAGLTRHPSKGQFLCAQQVLEDHLGFRIDIPNNSLSIPERRCKKIRQLAVALRCEVARNRRLVPTQLLQQFCGAACSTSKAVPSARLHLRALYDCTSLHRPLSRLNRTALHDLHFWAELRPGNPANGVPLFKSPTSQVLYTDASGGTGWGGVLPAEPARRALCQARAQMPFADAASLHHAANIPCPEFLTGRTCAGFWDADTLPLHVTYKELHAFHRALRVWGPQLSQSRVLLFCDNQAVVSLLRHGSSRSAQLMAELRVVWKLLLDFGITLDPVYIRSANNPADAPSRYRDSSDWTFRPGLRRRLRDLWRSPFSLDPFATAATAMARNFCSLRDEEQHTAADGFSVSWSGHDLFL

SEQ ID NO: 457 - protein, 556 aa, synthetic construct
TWKKGPPKPFNHGVSLRELDLVSNQREFLKTETTRALGVGAWEPATCDRYVSKCFLVPKPGNKWRLVMDFRWLNSHCVDRRVKFETLKTLSRMAHKGDYMFSFDLQDGYHAIGIAPEDRKYFTFNLNGRLLQCSALPFGWNASPYVFVKTMKTLVQTLRSPTGVQDMAALQSLQDGPNRVGGRGTARFSHLTRQGGKNRPAVRGLRVLPYMDDFLVLAKTRKLANLAKLRVEAVLQELGLRRNVAKGHWDVTQRLEHLGMMVDTKTGLFQVTPSRMHKIRTLARETICLATRTNRLIPARQLARFTGLAQCVYLAVPPARHFLRELHNCVREKSSWSDRVRLTRQALRDLQWWVDLPAKWNGRAIWRSPISAVLHSDASMTGWGAVLNETTPARGFWNRQERKLHITELELEAVYNAVRSFLPHLRGRSVFVHEDNQAVVHMLAHYSTRSPSIMRRLRKLWLLLDLNDISLSRVEYIRSEANVWADALSRELDTEDWRLNPVVFKMLEERFGPHTIDRFASVTSAQLARYNSRWRDPYTEGVDSLHLDWRGENNYA

SEQ ID NO: 458 - protein, 547 aa, synthetic construct
PWTNGGPPPPFNQGVSCRGLPLDQAVFLKQEIERLTLSGVLRPVEHSRWVSRAFLVPKPNNCGWRLIVDLREVNKHCKTRKMKMETLRSLRLIAKPGDHWVSFDLKDGFYSLAIDPKDREAFTVNLDGQLLQFCALPMGWSLSPFVFQKLTEAFTDHLRDPESSTNSPGALAAEKMGPKALKKWRRRRRRLTGARLLPFVDDFAMFGETYEETLQLVVYTFSLLDSLGLKVHPTKGHFLPILVGDHLGMILDFEKGEFRAPIDKLKSVAVLAKTLLCRAAAHKRWVSVKTLASLARKAQFLHLAIPVARFFLRELHDVVKTAKSWSGTVKISCQLKRDLEWWTKVPSHHNGSPVWKPVENAYLHCDSSGYGWGAVLNDCVEARGFWGMPDLNEHITFKELKAVRCAIQAFLPELRGKRLLLHEDNQSVIGVLTHLTSKSPTMMCELRKLFLLIDTYDIKIRTLYIRSAANVWTDNLSRVTDNSDWQLSPRVFRHLSKLWGPHTVDRFASSANRQLPRYNAKWRDGTAEAVDSLHLPDQAWRGEHNWC

SEQ ID NO: 459 - protein, 557 aa, synthetic construct
DFHTRPPPFNQGNSLENLSEEEQAWLDKEVSRNLGSGSWVAATIKTHVTKCFLVPKKVEPGQPKKWRLVIDLRHLNDFCRDKSCKFETLKSLRYLAKPGDWLISVDLQDGFHAIQVRPDHQKYFTFCLQGQYYTSAVLPFGWKGSPAVFVETLQTLTRALRTPAAPTAAGQPVAFLNYLREECHVKHRPRTALSAAYRSPYWAVRLRVLPYMDDDLFLFRSKAEAEAGALQIRATFEYLGLKINEEKSPTLSAPTQELRHLGLLVNTVRGLFLVPKDKERRIRTMARGLKVQALSNRRLLPARLLASFTGLCQSVYLAVPYARLYLRSLHDDLSQKAHWEANVRLSRQSLRDLQWWADLRDQYLGRALWRSPDQAELHSDSSGFAWGGQLDYNLLAQGIWTLDEKRHHITVLELLAVLRNVQAFLPRLRSKTILLHEDNQAVCHILRNFTSRSPVIMLYLRKLILLLDTNNITLRPVYIRSEDNPADAPSRDRAPDEWKLARQLFDRLNATYGPHTIDRFASSATTQVPRYNSRYSDPQAEARNAMTQDWTHEINFI

SEQ ID NO: 460 - protein, 599 aa, synthetic construct
YWNALGPPRPFDKGRSLDALDQEQQQWLEREEERCVSSGAWKRVKGNRYVSRCFIIPKAGLDVLGRRQFRLIVDLRPLNLHCKDFKTRYETLSRLSSVILHGETVSFLSFDIKDGYHFLEIEKKFQCYFGMNIQGRHYQCSALPFGWNGSPFVFNQAMRTLTKLLRSASLPTAESMAEDLSGRQRSQLWGQHALRVGKRKVPVRELDRTTEMSKVRVPWHVLPYCDDYLLTVKGQSRRQRWKNAQRAARRSEKSLNFLGLQRHPQKGQWLKADQGPEHLKDSVRHLGLDVNTEGGRNEYLAPAAKFARIRQAARDLRGRAGRNRRLVPARRLAAFLGLVNSCRLAITPVEMFSRAMHDDLATRASWSANVRLSRQSLRDLSRWIDVPQEWNGAPISQSTVTKVVYSDASDFAIGGVLASEKISDPTRPGLQIPGKRWHRALTLEEQAEGIFVGEMRGLVETIENFAPELTGKVVRFMEDNQAAMFATRRLTSKHPLVMPLLRRLWALLCEHRIRLQHVDYVRSEENPADEPSRWRFSDEWKLSPAVFRWATRELGACTIDMFASRNTAQLPRFGSPWRDSQAAVEDAWSVSWAGEKVWI

SEQ ID NO: 461 - protein, 592 aa, synthetic construct
YWTNGPPRTAWNQGRSCDRLSQEEAEWMEREERRLVDIGAWKRVRHNRFVSKCFLVPKAGLDAQGRKKHRLIMDLRPLNIHCKEFKTRFETLSRLGTVIMEGETVAFVSFDLEDGYFCLQIDPEYQQYFGINIQGRMYQANVLPFGWSTSPYAFCTAMKTLTRLLRAAHLPTAEVVAQSLSGAYVEQCSELERLSGLRVGSTPVRAVELSAAAVQSVRPETDWLPYIDDYLATVRGATEVERAERAEAAKQHAEESLDFLGLRKHAEKSQWVPKPTTDHLGIHVDSTTGQFLATKVTMARIRREAGVLIARAKSNRRLVNSTSVRSFAGLVQSKYLAIAPAQLYLRSLFDDLSKDDWSASTRLSRQSLRDLQMWRDQSASWNGSPISKAPVTRLLYSDASEFALGGNLVEGDLSRVVPERPGLAVPGPRWHRALTLVEQQQGIFVGEIRALVENVENFLPQLRGQVVQLMEDNQAAMYATRRLVSKHPVALRLLRRLWVMLSANRIRLQAVDWVASADNPADAPSRWRFSDEWKLQPAVFRWANREFGPHSLDLFASRNTAQLPRYVTRFPDSKAVTCNAWAHSWVAETSWI

SEQ ID NO: 462 - protein, 554 aa, synthetic construct
PWLRGGPPPPFHHGESLLDATRAQREWLHAETERCLASGAWEPATARSHVSRAFLVPKPSPPGAPPKWRLVVDLRELNRYCRGVGCEYETLRRLQRLARRGDWMISFDLQDGYHAIGIHPDHRRYFTFSLPGLDGVPRYYQCAALPFGWNLSPYVFTKTMRVMVRRLRAPLAPARLPTWRGARGAAARALRLRVGSSHPSSVGMRVLPYVDDFLVLARTRAECFECRRCVERLLARLGLARHPDKGFWEPTQALVHLGLGVDTARGLFVVPPHKQAQISEQATRLLHTAARRRRLVSALQLASLAGRAQAVHLACPSARFYLREIHTVIASRSSWGALVRLSRQALRDLRWWAALPSAGVTRAIWRSPVACVLHSDASRRGWGAMLNSAVPAHGFWTPRERGHHITYLELMAVHRALLVFLEQVRGRSVLLWEDNQAVRHILTAGCSRSPEIMRLLRRVWWLLDSEGIDLRVEYFRSDDNVGADALSRIRPEDETALRRPAFLDLESRWGPHTVDRFAAPGSSLLPRFNSLIPARGVEAVNALAQRWDGENNYA

SEQ ID NO: 463 - protein, 563 aa, synthetic construct
EWTKGPPPAYNEGISFQGKQATQCAAEQAFLEGEIARLLGNGALEDAPLDARTHVCKAFLVPKKVPVGQPPKWRLVIDLRPTNLYCVHRGCKYETLKLLQRLARKGDWAVSFDLQDGFNAVAIHPDDRRYMTFALPPPAGSPPGTPPRYLRCAAMPFGWCASPLVFTKTMRVMVRLLRSPLAPTLERVRMRDRQARRYKVRLKKGQPHETGIRMMMYVDDGLALARTRAEALRCRNRISRVLAQLGLRRHPDKGEWEPVQRLEHLGLDVDFKAGLFLVPPRKIKGLQGQARDIMGEAARERRLIPARRLASFIGYAQSVHLACPPARFYLRALHDCLGSRQSWSSNVRLSRQAITDLRWWRTVGADADVSRAIWRAPEQSTLHCDASHLGWGGVLNMTVPASGMWTNRERGHHITHLELLAVHRSVAAFAKQLQGRSVLLWEDNQAVMHIITNRTTRAPAMMHLLRRLYLLLDTLGISIHSRYIASEQNSLADALSRGSPFDELQLRDAAWTEIETEFGPHTVDRYARLGNARTPVWNGRETAAKGAGAGALSQPWAGENNFV

SEQ ID NO: 464 - protein, 562 aa, synthetic construct
DWIEGPPPSFDHGVSLARPGDLPAAQSAFLEAEIRRCFGTGAWEAAPTDERSHISRVHLVPKKVPPGHPPKWRVVVDLRPTNACCRERGCRYESLAQLQRLANPGDWMISFDLQDGYHQVGIHPEHRRYMTFALPPPPDDPTGPPRYVCCAALPFGWTSSPRVFTKVMRGMVRLLRTPLAPSGADLRQAGAAQRRLVMRVRRRGARDPGDVGMRMLAYVDDFLVVARSRSLALRCRARVEAVLRLLGVQRNPTKGWWEPTQRLEHLGLEVDTAAGLFRIPPRKLLELEGQATRLRRQVMMTGRVPVRQLASFVGFAQSVQLACPPARFYLRALHDDLAARRSWQDSVRLSRQSLTDLQWWRQISAADVARAIWLAPEQAALHTDASHLGWGGLLNDSVPAAGIWTGRSRGSHINVLELLAVHRSLDAFLDKVSGKSVLLWCDNMTVVHILMNRTSRSPVLMQLLRRLWFLIDAAGISLTVRYVSTHDNNAADALSRGSPFDELVLRPSAWTALERRFGPHTIDRYASASNACLPRFNTASPGGGGEGALGLSQRWEGENNFA

SEQ ID NO: 465 - protein, 544 aa, synthetic construct
MTQAQSTFFEAEYQRHFLTGAWESAPPDERTHVCRVHLVPKKVPAGAPPKWRIVIDLRPTNRYCRPMRCRYETLKVLSSLARKGDWCFSWDLKDGYHQIGVHRESRRYMTFAVPPPPGSPPGAPPRYVRSAALPFGWSASPYIFTKVMRVMVRMLRSPMAPALRVARLRTRGGRAFALRLDSHHATAAPSVRGFRVLPYVDDFLAICRTRGECFAARRRAAEVMERLGICRHPDKGYWEPTQRLEHLGIDVDTGQGLFRVPPEKLKKLMDQARAIRGLSAREARLVPARLLAGFIGYAQSVQLACPAARFYLRSLHDVLATRAHWDARVRLSRQALRDLQWWEQIGTAEVSRAIWRSPIDRTLHCDASHLAWGGVLDATVPASGMWTGRACGRHINYLELLAVHHTLQAFGSQLRGQSVLLWEDNMTIVHVLTNRTTRSLELMHLLRRVHYLIDTMGVNLTVRYIASKENSQADALSRGSPHDELVLRPEAFRRLERRYGPHTVDRYATAANAQLARFNTLLPEAGGEAAMALSQQWAGENNYV

SEQ ID NO: 466 - protein, 558 aa, synthetic construct
TWKHGPPQPYNFGVSLRDTTPGQQEWLDKEMDRLLSTGAVEPAPLEECTHVCRVHLVPKKTPPGEKPRWRMVTDLRPTNAACIGQACKYETLRALQRLARRGEWMISWDIKDGYFAVGIRRDHRRYMTFALPPPLGMPGPPRYYRCAAMPFGWLMAPYVFTKVMRVMVRMLRTPTAPSLARLRRSAASGKALVLRLARRGRASGARGLRILPYVDDFLCICPTRRDALHARDRCTEVMDFLGITRHPDKGEWEPTQRLEHLGLDIDTEAGLFRVPPRKVVELMRQARDVLGRAKQEARLIPARELAGFIGYAQSVSLACPPARFFLRSLHDCLSTRTSWDGRVRLSKQALRDLAWWKRFDSADVSRAIWQEPAQSTLHTDASKLAWGGVLDQTVPAQGFWRPRDRSRHITYLELLAVHHTLQTFLARLKGRSILLWCDNLSVVHILENRTSRSPEMMALLRRVWWLLDSAGIDLRVRWISTHENTMADALSRGSPHDELTIDDAAWARLEHRFGPHTIDRYSNVVNARVSKFNTELPHPVSAGAQALSQCWAGENNYA

SEQ ID NO: 467 - protein, 561 aa, synthetic construct
DWLSGPPPPFDHGVSCGRGSLSKEESTFLESETRRLLELGAWEPAPAGERTHISRVHLVPKKVEPGQPPKWRIVVDLRPTNAYCRPRGCRYESLRCLSRLARRGDWMFSFDLQDGYHAVGVHPEHRRYMSFALPPPPGSPPGTPPRYLRTAVCPFGWSASPRIFTKVMRVMVQQLRSPGAATLERLRRRVGGGAAMRLRLGRQGDPWSRGMRVLPYVDDFLCLAASQAEALQCRAMVERVLERLGITRHPTKAVWEPTQRLEHLGLDVDAREGLFRVPPRKLRALMQHARSLRGMACRGRRLLPVRAIAGFVGYAQSVELACPAARFYLRALHDVMATRRGWDSTVRLSPQALRDLSWWAVIGSAEVSRAIWRPPHTRTLHCDASHLAWGGVLDGTVPAQGMWTGRACGRHINYLELLAVYHTVAHFFGELRGEHVLLWEDNTTVMHVLSNRTTRSPHLMHLLRKVWRLLDGAGIALTVRYIPSDQNVLADALSRGSPFDDLRLRGATWRELERRWGPHDVDRYAAPESARLARFNSVLPCGESEGAPALAQCWAGTNSYV

SEQ ID NO: 468 - protein, 562 aa, synthetic construct
DWTQGPPPPYDYGVSLAGRSDLTMQQSEFLEREVTRCFATGAWEEAPESERTHICRVHLVPKKTPPGEPQKWRVVVDLRPTNAYCRQCSCRYETLRVLQRLARRGDWMVSFDLKDGYHAVGIHEEHRRYMTFALPPAPGSPPGAPPRYIRCAALPFGWLASPYIFTKVMRVMVRMLRAPGAATFERLRRRTASGRAAMLRLGSRGDPWVRGMRVLPYVDDFLALAATREEALRCRERIEYVLNRLGITRHPEKGYWEPTQRLEHLGLEVDTEAGLFLIPPSKLKELARRAVGVMTVAAADRRLVPVRQLAGFVGFAQSVELACPATRFYLRELHDVMATRSSWDAKVRLTRQAFRDLRWWRRIATADVSRAIWRPPTDRTLHCDASRLAWGGVLDGTVPAQGMWRGRDRGRHINYLELMAVYLSLQQFYGELQGASLLLWEDNMTVVHVLTNRTTRSPELMHLLRKLWRLLDTAGIKLEVRYIPTDQNTFADYLSRGSPLDELVLRPTAWSALERRWGPHTVDRYATARNTQLRVFNSLLPEPASSGASALAQDWHGENNYV

SEQ ID NO: 469 - protein, 562 aa, synthetic construct
EWIASPPPPFDHGVSCSGPTGITPQQSEFLEKEIARCCATGAWEEAPIDERTHISRVHLVPKKTPPGEPQKWRVVVDLRPTNAFCRPKSCKYETLKVLQRLARRGDWMVSFDMQDGYHCIGIHPAHRRYMTFCLPPAPGSPPGAPPRYIRCAALPFGWSASPMIFTKVMRVMVRMLRAPSVATFERLRRMTRRGQSAALRLGRRGDPWVRGMRVLPYVDDFLCLARTRREALRCRQRIQYVLDRLGLMRHPEKGYWEPTQRLEHLGMDVDTAEGMFRVPPAKLSGLMQQAGAILAIASAARRLVAVRTLAGFVGYAQSVELACPEARFYLRALHDVMATRTSWEARVRLSRQALRDLRWWRHVGTADVSRAIWRAPTDRSLFTDASHLAWGGALDGTVPAQGMWVGRECGRHINYLELLAVYRSVMAFEGELRGSSLLLWVDNMTIVQVLTNRTSRSPELMHLLRKVWRLIDAAGISLTVRWIASKENSLADALSRGSPFDDLEILDAVWAEIERRWGPHTVDRYARPETARCARFNTLLPEAGSEGAMALSQDWHGENNYV

SEQ ID NO: 470 - protein, 562 aa, synthetic construct
EWMRGPPPPYDHGVSLAGPGAMTAQQSEFLEKEVARCFGTGAWEQAPADERTHICRVHLVPKKTPPGEPQKWRVVVDLRPTNAFCRPKSCKYETLRVLQRLARRGDWMVSFDMQDGYHCVAIDESHRRYMTFALPPAPGSPPGSPPRYIRCAALPFGWSASPLIFTKVMRVMVRMLRAPAAATFERLRRQTASGRAAILRLGRRGDPWVRGMRVLPYVDDFLCLAATRAEALRCRERVTYVLDRLGLTRHPDKGFWEPCQRLEHLGLEVDTEAGLFLIPPAKLKELMRQAGALLATAAKEGRLLRVRTLAAFVGYAQSVELACPAARFYLRALHDVMATRANWEARVRLSRQAIRDLRWWRHIATADVSRAIWRPPTDRTLHTDASRLAWGGVLDGTVPAQGFWRGRDRGRHINYLELMAVYLSLERFEGELQGSSVLLWEDNQTIVQVLTNRTTRSPELMHLLRKVWQLIDFAGITLTVRWIASKDNVLADALSRGSPFDDLTLTDEAWRELEWRWGPHTIDRYATAETARVAAFNSLLPEAGSAGAAALAQEWMGENNYV

SEQ ID NO: 471 - protein, 562 aa, synthetic construct
EWLHGPPPPYDHGVSLAGPNAMTAQQSAFLEKEVTRCFATGAWEEAPAAERTHICRVHLVPKKTPPGEPQKWRVVVDLRPTNAFCRPKSCKYETLRVLQRLARRGDWMVSFDMQDGYHCVAIAEDHRRFMTFALPAAPGSPPGSPPRYIRCAALPFGWSASPLIFTKVMRVMVRMLRAPAAATFERLRRQTASGRAAILRLGRRGDPWVRGMRVLPYVDDFLCLASTRAEALRCRERVEYVLKQLGLTRHPEKGFWEPTQHLEHLGLEVDTEAGLFLIPPAKLSELMRQAGAILAIAAKEGRLVRVRTLAGFVGYAQSVELACPAARFYLRALHDVMATRANWEARVRLSRQAIRDLRWWRHVATADVSRAIWRPPTDRTLHTDASRLAWGGVLDGTVPAQGFWRGRDRGRHINYLELMAVYLSLERFEGELQGSSVLLWEDNQTIVQVLTNRTTRSPELMHLLRKLWRLIDHAGISLTVRWIASKDNVLADALSRGSPFDDLTIIDEAWRELERRWGPHTVDRYASAETARVAVFNSLLPEEGSAGAAALAQEWMGENNFV

SEQ ID NO: 472 - protein, 728 aa, synthetic construct
LSEKFVLAQVSFPSTMAPEWQKELASTLIEFSDVLSWHEFDLGKITDVPCRINRKEGWTPAVDGPRRNLKLAHNRQIIQEKSLPLVKLGVFKPAPSTAVDRAQLHIVYRDKSKSPSSARVCHDYRKLNSTIVPDPYPLDTIPDLYAFMSEKEGHHCYFTVDADRGYFQIVNDPDTEQYTAFEMEDQLWITTRLVFGIVTGPAVFARNADALLGDLKHSERVLRNYFDDLVGKAPNEAALIQLLRRLFLRARQKGWKFKPKKLQFGFYDVKVFGNVFSRGTVSLTKERIDAVQALTPPTSVSELRSYLGLINTFRDRVPGFSLRTQALTSLLKLKPDSAGSKNRRPPFVMTPEALEEFSQLKTILLHPAVLQHFQPGRQTFLYTDASLGQRNEEINVPGGLGAVLTQVVDGVEVVCAYLSAGLTSAQRNYAIPRLEALAFVYAVGKFHALLDGVPFTWRTDARANQYLRDARHSSNPVLFRYSLVTQEYQFTVEWVPGLQMIADTFSRMTLVTADGAEALTLPEIVFGRDIGPRVAALSPTATLYTQKAYLPHLLFDSNLRSPSMEDVACYTAYSLSTEQLDPTMVSPLLVCEDFERATLAPTPEEAEAFSKIDQEPIIVADPVQYTKKDTTWLTALRLVRPLLLKEATIMARLRELKLWDGEESIGVPVSPRRPQSTASMENRPRIPISMLLNDDTLPDSSGYFATQVDPVRWVERLTKGERVFGLVD

SEQ ID NO: 473 - protein, 801 aa, synthetic construct
SKLDVGKTDLIECDMKVDTSHPSYKSQKQRYMPRDKLKVAQEAADVLLKSGVIQLSETPELKSNLCLVPRIEAGHIRDSTIAAKINQKNKQQGNTWRVCVDLRNLNACSIGNTSPSLSTLDSILAALRGKMVTNLDFSNGFFHIPLSENSKPLTAFYLGDKIYEFCRLSQGYIYSPTVFIKFMQRIFCKEEFELSKRILSPAELEIIKNMTSFEAISVNFMDDLWIHSPMELGFDGHLICIKLVFSALSRAKVKLGPKKCVFYTHDFKVLGIAVNSKESTMFIDEKKANAILMWGRPSSLAELNSRIFSLNYWEKFLPKLREIIAPWYLVLRSQQFYWDEHCEDAFNQLKMLILADIRLNIPNEDDQLILATDASKLSSSQVLFIRNKDGTLKICGCNSRIFSYQDSRRDANFKESISLATGFKVFGPYLSLSSKAPIILCDAKNLMYISRLKERSILANNLIMYLTDMAKLYEFQVYSIPGPINFLADLLSRAFSKSRFVNKNKYNLSKETAEILPNLNPLFSIDNETLVKYFQSEMLPEKDDKGNKHKNLPKQLEPLLTMYMNRTPEERYIDTILILKQITRRIKNSKLNSTIIVEGTKELKLSEDDIKHLLSHDTTRGSESKKATYVKPLLERIIDEYFGTDLDPKYKIRIRDALLDNFLKMRRIDSSSSYLNNMYEDLSIIVVEEINNNILYSYEHLNDIFINQNYKTYTEDIIEDDGTIIKIVPRFDENSLLEENSSYNIQLTEDLEDKNTSDNVSYSLNLKLLHSKVEKLDQIDILKNEKIKVYQNGKKLNIYFT

SEQ ID NO: 474 - protein, 759 aa, synthetic construct
GAPSSTLDGPKFDIEFAPNAQPVKHTLPKYSEDQKRKEAYHVDKAEKLGHLRTPNETQKSEWATRTHCVWKKDDDMGRWICDFRDVNKATVKKPIVIGDSHDLVRQLAQKKWKTMFDAWAGFNQVAATERAKKAMQITTSVGLRQWEVMPFGVTNGPSCFQGIMIDHFTPIAADLKEFEAAINFFFDDGALGSGSWDMPDSESDADNGFDQHLKALDVVFKRAAVINLRFKLSKCHFLQFAVPVLGEIAGLGKVSPDPSKTDAIRNWPRPSRAEDVERFLCTLSFFRTHVSPKFSEIAKPLRDCMSELHEKRAQGKYRKVVRGGDPHVTNRHGNASEHWPAFWNNECESAFNTLRDLAAKAVDLSVPDLEGAHNGTNPFILFPDACKFGVGSGLFQACPVNPELRKSHYFTLGCPTWSTKAAITLRFNELKRTYTKATNNSNKLSEIQVAFDVLGDTEKRAAYDLSLGLEKTHLSRIDLQPLGFVLVNRLTGAQVNWTTWDRELYAIVAPIDHFSSLVSGATCVLATDHLNNTVMNVDLKQPDKILRMLLKIHTKINPVWQFQPGRGQLGDGFSRNPPDRDKVRDAEADTARLPSTLGEAFELITKAQYRGGIEVDDCEELTQQFATMCERSADYIPFNSTDYLLSLPSFGPKTVEQHINMKQSVANRTSSVGVVNKSDFVLNCPSKTSLPYAMYKLPALLLPNANMTEDEVDDLNSTLTVRGPESELSVAVPFGTGGFRYTVTDAMGTGRWLEPYVPA

SEQ ID NO: 475 - protein, 452 aa, synthetic construct
NPGKCNCFEYRFQLQGRVPESRNSRPIPFALSKEVQEQVEEMLADHIIEESYSSNVNPLTLIQRDGKRVRICFDAREANKFMTPDRAKVPPVQMLLQRFHGASCISTLDWSSAFLQIPLEKTSNKWTAFQFQNKVYSTNLHAYHMGSEILSALLLGHFSQYWGADTSEYALHYVDDLVVFSKTFEEHLEHLDSVFRKFTTSGVTMNIGKCNFCKPEIKFMQFLQTRNQILITHNFQELNRPDPQKIEAILNYPAPHNHKQLKKFLGMCNFHQRFIVNYAEHVAPLLQLLCKNTPRKWSAEMQEAFVTLRDKFATTIHLVHPDGNLPYIINTDASAKAIGAVLLQQDREGNMNIVSTASRVLTPTEQSYTTCEQELLGIIFALEKFRIYIFGHKIIFYRDNKSLTFLNRCAITLNRVARGMVNLQQYNIRVTACKGGPQPFGRHNQPKSSRSK

SEQ ID NO: 476 - protein, 516 aa, synthetic construct
LQPYLDDNVKIDPSSFCPHPFMIVDLKVAPGATVYQRSYRPFSQSQQGEVDKQVEQWEADGVIVPAPPGTKHMNKLTLAARHDLDGNIIKHRVCLDPRHLNSLLEDTDNFLLPLITDVLEKSGGHKFYSTLDLKQAFHRLPLSKKSQPYTAFMHKNKQFMFARAPFGLKPMTSIFQRGMSLILGDLAFVAVYVDDIVIFSNSKEEHALHVQEVISRLTKANLIINPEKCHFFCTEVILLGFIIDRNGRRIMPQKIANIKSWAPPTNAKMVQRYLGMFNYFREYIPLYGTLSAPLDELRFRRGHFVLSDLQLECFNQIKYLISQAPVLHFPDFSKPFYVATDASNLGLGAVLYQLPNGPEDESVVHYISFMARSLKKHERNYPAYKKELLGIVFALKKFHYYLWGRPFTLYTDHKPLTFIKTQADLPATIANWTETILSYDFKCVYRPGLLNIIPDALSRAFPSELWPSPDPDPLVHRDKRRKAAVSTRSSFRAFSAPSSPELVVKAKDLANQMLEL

SEQ ID NO: 477 - protein, 704 aa, synthetic construct
EINPNISPEQRTNLLQTLYMSAYTCKFEEFDIELKHDNPCYRRQWKQPLALAHQKIIDFHIREMLQSGIIEPSRSQKYNSPLFIVPKKNNKNKNTLNKGHRGRNQNQEIDTSPDAWRVVIDFRAVNQIVKPYTVASKGVKQVIEEITTLPDNNEQLPKYFSVFDLFHGFYNLVLKASSRDITTFTSTDGLRYRFKKVPQGLNISPALFVSVMHRLYAQLRNQGRLNYYMDDLILYDHSFDSHLENINNFLQILIHNGLKCNPAKTQFAEQKVRFCNFDISSEGISIPDTSLKVLHNLVESVRDKRSLLRALGLINWFRLFIPNVSKRTQHLRNLTKKNVPFEFTQVHRSELEDVISVIKNATCLACYDPHKPIFIMVDSSMAGTGFIIAQDTATRQFGIDKTPEQRIQELRRSTFKLRPIFLALVQQLNPCENGVRIVMRKWSAHSLELHGLMRALQSCEHLILPGQDIFVLTDNSSIVHFNTLHFNNSRQKRLLAYLQYFRLQIFYTKGKKLERPDCLSRVFETMSENEISQFHPPEIEDFIFSINPKVYTEKTDECVSMQSFPETLTSGVINLLTNMNETTKNKLERSYPLSLKALFLNNNENICFDSVSDSLYTQMHEDNGPSEQSARPTNENSVSSTLNVNATNFVPKQSTYEESASSHVSVDNIINATRVLRRSSSTTDVNISNSECTPTGENISPLIE

SEQ ID NO: 478 - protein, 646 aa, synthetic construct
HPGDIGRVNDPRFLMDIILKDDNHPLPLELPYQTASNKKLACSRIVEGWLQSGIVERSFTRTHASRLTVASKHLNKTDFKKIVDRLQAEHGLDFSNLDQFEFSRIPPNLLTAYELSKGYRVCLDARALNNLTQDEIICSPNPDLMISELMFLPSYQLKLSANSDLMSNVPESLKKYFDTDIEDDDCMYYSSLDIRSAHTSLVLTERASHYLNVILPDYSLIRFLQSPFGLKTINSRWNSFITTVLHDLIQRKLVVIYADDLLILAKGRKLHRLVLIEVFRILKKYNVKLSINKCNCFVDKFQFLGFNFDSNGITLTDERISGILNLEQPCNLKGLQRILGSMVYIGRFISDLSTHLLPLTHLLNKNVPFILGKMTLKFIDADQELSLYCDSSKKAGGSVLFQEDKITKQPNPVCFFSRKYNTQQTQHYSSLELELINIIDSLSRLKAFINLSSKPIKLFTDAKAIIFLLKAVKEGPNPKLTRLASKLAEYQLNFQIEYCKPDGNQKFLIADFLSRSREKEDFENFPPPPPMQSFRKITKEHINHSLPKGANFTLTDLTEQVDKHPEWFVQFPTPSSPFLPALPASNGNLAFQGDNAQENSIFLPVLDPDSDSPKILHRLLFLRRDLSAAEIIKKQSEDKFICSFVD

SEQ ID NO: 479 - protein, 538 aa, synthetic construct
SPDEIGCVQPSMVAPMVIFTVPHVPWDLKPIPVPRALLPKLVTLLKEKMQMGILEPSMAPYSNRWFTVPKKSGALRFIQDMQPANRVTIRNKGSGPIVDEVAEAFAGQAIYSIGDLYSGYDQFQLAIESRDLTTMKTPLGLVRMCTLPQGATNSVAHMQSAMNQILRDFVPEKTIPFVDDIPIKGCPERVKDSTMDADGCRVFVKNHITDVERILKRLEEVDLTLSIDKSKFGFDEIVVVGHLCGRYGRKPNPEKVDAIARMKACRSTTEVRRFLGACVFYHIWIPHFAHMAEPLYKLLRKGTKFAWKEDQSLAMDGLKEILQSPPILQQVDYDCGTPVVFTVDTSPIAIGWAIGQDDAEGKRFAIRFGARILTERPRAYPQVKRELLGALTALKADRNYLIGANVVLETDCLPLLGMIANCSIPDIAMLRWIAYIKSLNPILIHITGKKNSVADMLSRARYVCEEEMETQEVDEDNEDDDYGYVLATSQANSDGEALPFRAELYEGRLRDIGLYLSTLKRQEGWMDKTFKDIRHQSY

SEQ ID NO: 480 - protein, 714 aa, synthetic construct
DNPGRVVTTAVPFTAVLKPEHDPKVTPGVKPFHEYRRPPPALATVMQQWVLDSVKAGILKPHRSAYSSPLFMILKPPKADANGWIDPDQPKKYRTLCDLRACNRALVEEKFPQPSCQEIFEKISPDMKIYSGLDLCSAFYQVPTAPDVWDYLSVVTPPTEIKERIDIQLTNGDRTVVEPGVYHSFTHLRLPMGMHASPSHFSNTLYDTLRRHVPEYFNTNILQFADDLCIMTETYQEHWDVLSALFRGLDSDGWTLARSKAFMFQRSLRFLGLIVSSAGVDEDGTTGVAKLYGDKQKVETILNLKRPADLTELRSFLGACNFFRIFVPAFSLIASPLVKMTKQGVNIKEQWGEEEDRAFRDLKLAIATAGAVTPYCPQKEVIIQVDAYRLGVGAVLCQIYGAKARLVAFFSKAYREPAWQWKGPGTDQLEPSSDNNKRPKQKPGSSKPPQALELRGIVEAVLHWRNYCIGNTVGIKILSDHGSLRYIESQRSKGLCSDQTERWCNFLSSVQAQVSWRAGAGLAVADYLSRHGHDERSWDELNWTSKYDGTDEGMKPANEVLKEASYDAYDFGASCDAAIDRKLYGGGDELMAGIPITDVLPLSCPDSERKFKGADLKMFVRLSQMCVDQTGLCGLDSRRFEVEPLNCGLSATDTAEGATLRPVDGRELALATVPVFKDLWEPEKLSVLRDTMEYDGKERLIQRARLEGWTDAQA

SEQ ID NO: 481 - protein, 815 aa, synthetic construct
NIPPEWTGGEPYADLKLERDSPPIQHQERRIPPLALPVVMAQIRAWLEAGIVEPSTSPHSSPLLIVAKKALAPPRDPKTGLPVAGWNPKPRWRVCVDYKTVNSRLQAVNMSNAPRLEVCLHQVASCNGYTFAAREHETRTGQSDKTKRWLATTADLCQGFHQLRIAPECRPLTAFTIPGVHTQEGHLQFVCCPFGLSTLPTHFHQVVGQAIGNLHYGDLPLSKEAPGSGQAPQQHQPDETGLEVEVDPEESWRILNQDPDNRPCASHYIDDVYISSYTTFEAHLASVRKVFKRLEAVGFGARVDKVEFAQTELQMLGWKVSEGRITTDTSKVHKIINEIGGNDDVLRDKKDVMSALGALNFYRSMIPNAGGISAPSTSLVVHRAALRALKTALLSDTFLAVPQENKEFYLVTDASVHSGAAVLAQVQPNGAEHPVSYAGTSFPETARRWSPSERECFTLLWGADYFKNWIRCGRTVLCSDHQPLIALARASTSNNSKLARWSARLAQYSNAVVSYRAGVCLGLSDTLSRLIYPAKVDTPDTRESLQATHRGFAPLENVDSIQGKGLRKFGLPLQRLSMLRPPTGQKWEDATRAYESARKQRDPPTTQPVMHEPDVLGEAVRQEKDQFSKHHDWFQPGAISADQAVRIMRYAMGTGEMAVLSEEELGSGDYYLSKWLDTTPLEKMMRGEGCYKTVADSDSDEQTTGIDDVDDAMSRKTVGDLFEEATGRRPDEEEVVYVCPLPETKRTHLWVAGKKPLDTNWEQLNMTTNMDVDTDYDSDENDDPLEALQQPDLEAWIQSQRFEDRDGREMRCNLT

SEQ ID NO: 482 - protein, 205 aa, synthetic construct
GLGKIKGVQASLHVNPEAQPRFYKPRPVPYALRKKVGKELDRLEEEGVILKVQHSEWAAPIVPVLKPNGTVRICGDYKLTANTATQTEVYPLPRIEDLFASLAGGKVFSKLDLSNAYLQLPLAEASQPLATVNTHKGLYHYLRLLFGISSAPAIFQRTMETLLQGLPHVCVYLDDIVITGHSQHLTWEWPQRPWMRVHADYAGPF

SEQ ID NO: 483 - protein, 501 aa, synthetic construct
EDPLAWWDKNEIQASLKLQKGKENEFVRYKPILMNQSDRKDMQMILKEHMDLKLISPGVSPYSSPGFLVRNHGEIKRGKPRLVINYQGINKILEFDGYYIPSREHLINCVQNAKVFSKFDCKSGFYQIKMEEESKKYTAFSTPQGHYIWNVLPMGLSNAPQIFQRKMDNLFKDYFSFMYVYVDDVLIASKTVKDHLRHLEIFSDVCFKNGLVLSEKKAVILTRKIEFLGIEIDESGIILQTHLVEKVRNFPDNLKTVKQLQSFMGLVNFAGMFINNLASYRKVFSPLLKKDADFKWIEEHKGTVQQLKKLCQNLPKLAIPNDEDGLVLYTDASDHWWAAVLTKVEPKGEVPCRYCSGLFADNHSARLFLLAKKFILKIDNTSVKAFLKNKIESKPEKARLLRWQAECQYYDFDVMVIKSHENILADFLTRDGATMEPHEANTILTRWRHQRESLEELNRSINSLAINAKAAGHVQEIDIKKVEAAMKATWLCNTSLWDSLI

SEQ ID NO: 484 - protein, 544 aa, synthetic construct
KYPQVVSLHGLDAGNLSLTLGYTQLRLREGEILPRAKRIFHVSPSDARHLDDIINLLIKFGFVMRSPPSPTGHHLYGMSAYLVPRAKPGCLGRLIVDFSPVNQLIESPSAVIPEINNTLQFLQGKVMYTSLDLRQAYMAMRIDEESQPLTTFLTPSGSYLFKSLPTGAAGSPALFAEASNRMLNFEPVLDQQGKPIFESPNVVKQDPSPLGHTISYFDDILVTSTSKATYEETLKEHFANLEETVKRLSFHGAKISVTKCDFSKIKILFLGWFVSHNFVVADPRRVQKVKDFAFPTNKKAVRAFLGLVNSLRKVVAMNVIEQVGILTPLTSSKTEFKFEQKHVKAFESIKELLTKEPLFCNLIDENAEKYLWCDAATGSGVLAGVLAQRIVGNKDDKIVPVHLDLENEVHQIIYDGSLPYEPCTLYTSLPIILPKPSLRKTIPPSIAKEHPLCGFTLENQIDSFFWSTLSVLALYSGGLTETVESLREKSVKYLKSSILNAQLKDFIFDMNWNNYNDFLTAYKAGKVGLDENLYLAKALAIYLQ

SEQ ID NO: 485 - protein, 790 aa, synthetic construct
KYPQIVSRHSLDRGHLSKTLGYFNLRLKENIVLPKNKKIIYESSADASMLRDVLDYLCKLKVISKASLTGDDIPNFSSPCFLVKRSSKDSAARLVVSYKLLNECISQDPITISNFDMILNRLHSAHCYSSIDLKSAFQSIELTPESKKLTLFSCMWGSYIFNTLATGMSVSPNALARFCDVMIHHIPSRDKNGKIQLNEKGLPIMINDRIPNVEIFYDDIIIFSKAGRTYEETIKIHFDLVEKVVSRLAFHRAKLEVAKSQLCKFKISFLGWLISNNYLMVDPRRVEKLNEKTFPYSAKGMKSFLGEVNWLRNTLNFQVLRNIHYLTPLTSTKLGKYNPNNIHREKFEELKKQLTQSCLFSKICLPGVPKILFTDAASEKYSQYSCVLAQIVPAKFSKNFVPSYIYLDDPTHRIIFDLKLPVKPVPLKKDNQTIKDYLINLESNYPPEYEYLDDDTLGYQEHFKISLSVCLKLMLELQNCVTKFESICFDLQKHIREHIMYNHILDTEHKGNKLSMKLYLEDIKKGVLKIDTGLHIFSALSNVLHRPVTLINATNKFNGKKLIRFNNDKNKPPFFFLLYEKNSNLIVRPTILNKHSEYNIGKHKGSFEIILYHSKVIPEEMRKTNIMQLELYAILGSLQATRKMVNSDELLLACDNKCLYYLYNQDVKDSHTKINNWGVKIEHDYPNLGLVFIKSENNPADFLSRVFQVSKPEIAHIKLPYIVKDSLNDYMPNQTTMTVKDWRVWVENNPQFIEVDKTKLTERQLESINKRDKNIAKGKEKGKEIKSNSF

SEQ ID NO: 486 - protein, 508 aa, synthetic construct
ELPDEPPPDRPIKQHIYLREGARPISSKPYRCPAPLLKRMNEHIQQLIAKGYVSPAPDSPWSSPIFFARHPRTGKLRFCCDFSEINKLLKPQHSVLPSVDDIHAQLKGAKYITTMDCLSGFHQMQIDEASRDYTSFDTAFGRLRWNYVCFGLKTSPADFTRLMQFVLGDALYNFALLYIDDITVFSQTFDQHIKHLRIVLDRLQKHTIYLRGSKCHFAGREVKLLGHLISGESVRPNPEIMDSIASWPTPTSPSELKSFLGLARFYARFTHHLSHTCEPLHHLTHKEFSRKNFPWGPSHDKAFGALKEALTSAPAVALPDPSLPFSIVTDASLFARAAVLLQRQDGVNRVIAYHSKGLSPSERNYSPGKRETLAFVKGVENFQDYLRIGHFEAWSDNIETVALATNPHLNSMEMKWRDFLAQFDYTHHHLPGLKNIADYPSRRPDYSFMEESVSAETSTSAHVTITPSPLPTDILSAVRDAYKDDKTATAIIASLETLGSASSFHRRH

SEQ ID NO: 487 - protein, 324 aa, synthetic construct
GHTDILKMKIDTGQHLPIKLKAYRAILHKREVIEKAVDEMLSANSIRKSISPWSFPVVIVDKKDGSKWFCVDFRKFNQITKANYYPLPLIDDILALLGNAKYYSSLDIKSGYWQIAMEDSDKEKTAFVCQKCLSEFNVLPFAVCNAPSIFSEMMGIVLEGLDTFAVAYLDDILIYSKTLGEHIKHIQVFDRLRQHNLKLKLKNCNFLQTETTCKIQRFNFGHMQNTKIQLWALGIAEYDCNIEYIPGKENMCADLLSRPQPRPEEMNKPHTDDNNLEPDINNNAFEISTINSNKFNSKLCLNLRNLSKKESKTKMKPHLQETDI

SEQ ID NO: 488 - protein, 738 aa, synthetic construct
GLSYNAGALPAVPFISARVILDPAKGPHVPYRAAVRVLNPIQRAGLEAKIRQWLSQRIVEESASQWSWPLISVAKKRRPGQLTPEYRFCADLRVLNNKVLADSLFTGSVPANLALLERHCIYSALDLYNAFESCELEPNSRDFFSFSSPSGQQFRYRRLPQGFVNSPAIMSRLTAELLANLPTSSREAKLSRLAPETQSTHGAQRVPGQQEAGNSIPVNTHDNTLHNTPQNIPQTPPRIKPMKHTPPINNSGTLGYVDDVLCYSMTLKDHINLLHILFHRIREANCRLKTSKCFLARKEVEYLGYMVGENGWGMCPAYRQSVVSWPIPTNKKELSSFLGRANYYRAFLQHYSDLTADLNKAKTREQTPWVLSPEEIRQFHKLQEAFNNSEALSFPNYDDLKLNPLIMDLDFSKKGLSASISQNQECSDKIFRERLLCNVSRKAPSELSVSSSHRGEISACILGLNSFRHLLLLAPFKIRSDSISVRYLSTLKDQRSPFPRYFQLLADFTFTAEHRPGRTNIPDDSISRRDDLPEMNRDELDFHSSQSFVDQLTLAQLEELEDIAIEFADPYPALWSSQTCQATDMWPSSPQDLVKTDIDTPPTNHQDHICAEIHPKLQYLNKIQEQFKGVVGEVTDKYLAKVWSSGSAGPPVVPTEPPGVPAGPPMVPVGPPAVPAGLPKGQAGPPSAPAVHPPLAPDRPTARQRGSTAQPDSSARQPDSSGQDRTPAPGRSGTAPRH

SEQ ID NO: 489 - protein, 724 aa, synthetic construct
GLSYNAGALPAVPFISARVILDPAKGPHTPYRAAVRVLNPIQRAGLQAKIKQWLSQNIVEESASQWSWPLISVAKKRRPGQLTPEYRFCADLRVLNNKVLADSLFTGSVPANLALLERHCIYSALDLYNAFESCELEPNSRDFFSFSSPSGQQFRYRRLPQGFVNSPAIMSRLTAELLANLPTSSREAKLGQSTPETLSSSEPTHGAQRGTGQQGAGNSIPVNTPDNTPHNTPQTPPRIKPMKNTPPLNNSGTLGYVDDVLCYSMTLKDHINLLHILFHRIKEANCRLKTSKCFIARKEVQYLGYMVGENGWGMCPEYRQSVVSWPLPTTKKELSSFLGRANYYRQFLQHYSDLTADLNKAKTREQTPWALSPDEIVQFHKLQEAFNNSEALSFPNYDDLKLNPLIMDLDFSKKGLSASISQNQECSDKIFRERLLCNVSRKAPSELSVSSSHRGEISACVLGLNSFRHLLLLAPFKIRSDSISVRYLSTLKDQRSPFPRYFQLLADFTFTAEHRPGKTNIPDDSISRRDDLPEMNRDELDFHSSRSFVDQLTLAQLEELEDIAIEFADPYPALWSSQTCQSTDVWPSSPQDLVKTDIDTAPTNHQEHICAEVHPKLQYLNKIQEQFKGVVGGITEDKYLEKVWSSGPAGPPVVPVGPPAVPAGLPKVQAGPPLAPAVPPPLASGRPTARQPGTTAQPDSSARQPGSSGQDRTRAPGTQAAPSR

SEQ ID NO: 490 - protein, 602 aa, synthetic construct
DLPSRPNATWPAGEEYARLRFKPGREPKSVRQFRLPEGVRPALRRTLEDMLRHGLIEPHDGTGINSPVLFAPKPGTTELRFCYDARNLNAAIADYHYPAPTTEEMLDKIARLKQEAVASGTSGQLWLSKADARHGFFQVSVHPDDRKYLAFSVPVLDGSYRYTVLPMGLKSSSFEFQRRMDGIIAPLANRSTFDYEITGQEHGRPVVKRGSAIGTACIYVDDLLVASFGSREEHEALLYKTFELFSKHNIVFKISKTVLFQHELEFLGHVITQTGVKQQPGKVDAIRNWPPLRSQDNVRSFLGLASYYRKFVDGFARISQPLSDLLRGPPSTFPAPLPPAAEQAFSALKSALTTAPVLMFYDASRETQVWTDASDYAIGGVLLQRDDKGEWRPVSYYSRRLLDSESKYSTYARELLGIRDCLLAFRWYLVGIRFVVKTDHSSLTWFLQQKELSGLQARWLSVFESFQLREIEYVPGEKNVLADALSRNPDPHGETFEHMVPPSDMPVPEEELHLKQASAVPDVPDVAAVKVPIQLQLWSPSDEPTVLGAVDDAAAWRAEGYNVSGRTINTASSYREAYPLCPDFKAIWAVRKKPDKMAELYP

SEQ ID NO: 491 - protein, 592 aa, synthetic construct
DLPSRPSATWPGEEYARLKFKDGVLPQSVRQFRLPEGVRAALQQTIEDMLRHGLIEPHDGTGVSSPVLFAPKPGSTELRFCFDCRALNKAIADVHYPAPTTEELLDKVARLKQEAAAAGATGQLWYSKADARHGFFQVAVHPEDRKYLAFSVPVLDGSYRYTVLPMGLKSSSFEFQRRMDLILAPLANKTTFEYEVHRREMCQVDGADVERVVTRRGKAIGTACVYVDDLLCVSFGSREEHESLVHQTFARFAAHNVVFKISKTVLFRSEIDFLGHTLTQSGVRQQAGKVDAILNWPSPSSQADVRSFLGLASYYRKFVDGFARIAQPLSDLLRGDASSFPAELPPPAAAAFADLKRALTTAPVLVYYDATRDTQLWTDASAYAIGGVLLQRDSAGDWRPVSYYSRRLLDSESKYSTYARELLGVRDCLLAFRYYLVGTPVVVKTDHCSLRWFLQQKELSGLQARWLSVFESFNIREIEYIPGEKNVVADALSRHPDPDGERFEHLIPPANMPGPTHCHAFEDAALDESPTVSRQPASTVDGAADWQREGYNVSGRMPASASTYDSLYAACPDFAAPWSSRHHPHAMTETYP

SEQ ID NO: 492 - protein, 640 aa, synthetic construct
SLPARPQARWPDGTEYARLRLQPGAEPRSRKQYRIPDALRPQLQKTIEELAAHGLIEVQSGSPYNSPILFAPKPNSTEMRFCFDSRELNKVLLDHPYPAPTTEELFDRVARLQHDAKLAGVEAPLWFSKTDARHGYWQIEVHPDDRPLLAFTVPVLDCSYQWCVMPMGTKSSAAIFQRAMDQVLAPFSNTNRFKVRQVDTPGANDGTVEVTPAAMGSVREIRAPEHRAGPVGWAFGTAFAYVDDVLICSMGSREEHVALVDAVMASFARYEFTFKLSKTDLYKSEMDFLGHRLTQHGLTRQAAKVEAIERWAVPTTQTELRSFISVIGYYRRFVDGFARIAQPLTDLLREGQFEYPLPAAAQAAFVELRALLSRAPILKYFDPQDETELWTDASGTAIGGGVLQRDARGNLRPVAYYSRRLSPSEEKYSTYQRELLAIRDCLLAFRFYLVGLPFVCKTDHCSLQWLTEQAEMSPLQSRWYTVFLEYDIKEIQYVKGEKNALADALSRHPDPTSQPLDYLVPPFNMDIASFHGLGLSPDTESLAGHHALPTPRQLFDAGAVVQPVAPLDCPIWQAWEERPGSSKPSSVSLTLDDWRAAGYNVSTIQPVFLTNFRDAYPACPEFGPVWASLSRGAAGHDIYP

SEQ ID NO: 493 - protein, 638 aa, synthetic construct
SLPAKPQARWPDGTEYARLRLQPGVEPRSRKQYRIPDALRPQLQKTIEELARHGLIEVQTGSPYNSPILFAPKPNSTEMRFCFDSRELNKALLDHPYPSPTSEELFDRVARLQHDAKLAGVDAPLWFSKTDARHGYWQIEVHPEDRPYLAFTVPVLDCSYQWCVMPMGTKSSAAIFQRAMDQVLAPFSNTNRFRVRHVQTQASDGPGEGELEVTPASMGSVRTDAPGGAQREERTGWAFGTAFAYVDDVLVCSMGTREEHVALVDSVMASFAKFDFTFKLSKTELYKSELDFLGHRLTQQGLTRQEAKVDAIRKWAAPTTQSELRSFISVIGYYRRFVEGFARIAQPLTDMLREGQFVSPLPPAAQKAFVELRERLSQAPILKFFDPRDETELWTDASATAIGGAVMQRDARGNLRPVAYYSRRLSPSEEKYSTYQRELLGIRDCLLAFRFYLVGLPFVCKTDHCSLQWLTEQSEMSPLQSRWYTVFLEYQIKEIQYVKGEKNALADALSRHPDPSTQPLDHLVPPFNMDTTRFNGLEARSDVELPSPCELFPSGALVQPAAPPDCPIFQTWEQRPWSVAPSSTSSCTLADWQARGYNVSIVTPSFLASFGPAYLECTEFGPVWQALSQDAAGNDIYP

SEQ ID NO: 494 - protein, 638 aa, synthetic construct
SLPAKPQARWPDGTEYARLRLQPGVEPRSRKQYRIPDALRPQLQKTIEELARHGLIEVQTGSPYNSPILFAPKPNSTEMRFCFDSRELNKALLDHPYPSPTSEELFDRVARLQHDAKLAGVDAPLWFSKTDARHGYWQIEVHPEDRPYLAFTVPVLDCSYQWCVMPMGTKSSAAIFQRAMDQVLAPFSNTNRFRVRHVQAQASGEPGAGELEVTPASMGSVRTDAAGGAQREERTGWAFGTAFAYVDDVLVCSMGTREEHVALVDAVMASFAKFDFTFKLSKTELYKSELDFLGHRLTQQGLTRQEAKVDAIRKWAAPTTQSELRSFISVIGYYRRFVEGFARIAQPLTDMLREGQFVSPLPPAAQKAFVELRERLSQAPILKFFDPRDETELWTDASATAIGGAVMQRDARGNLRPVAYYSRRLSPSEEKYSTYQRELLGIRDCLLAFRFYLVGLPFVCKTDHCSLQWLTEQSEMSPLQSRWYTVFLEYQIKEIQYVKGEKNALADALSRHPDPSTQPLDHLVPPFNMDTTRFNGLDARSDVELPSPCELFPSGALVQPAAPPDCPIFQTWEQRPWSVAPSSTSSCTLADWQARGYNVSIVTPSFLASFGPAYLECTEFGPVWRALSQGAAGNDMYP

SEQ ID NO: 495 - protein, 564 aa, synthetic construct
FREMPHKNNITRPDSEKMRIKFKPGMEKEIPAPRRAKCPKHLLPIMKKALEELLDNGFIKPSTSPFSAPVLMIVKPHQEGVAAADLEYRVVVDLRAINNLTIPLHHRIPDITGIWHSLAGAKYLSVLDLTKGFYQESLREDDENEDGSGGTSSSDKTAFCCEYGSFQFVGAVMGARNTPAFFQGKVELALRRAGLIDVGILTKDTTGKHIITKGVPCCTNFVDDLIVYSETREQHIKDLRRVFKCLSENQYYVNMKKCHFGCKYVLFCGGVVGNGVLAMDPVKVKAIDDWVQPMNITELRSFLGMSNYLKMWYSNYSDHAGVLTNLLKKGKCVQRDWCPECTAAFQALKMGFKSYPILRLPDFDKQFYLLTDSCATAIGGCVAQMYEYEGEGGTNKMVLLPVAYHSRKMTKHEINYSVREQECLAIHDCFKKFEYLLLGSKFEVVCKTDHSSLKQVQEGGTLQTSKRLARWAEYLGGFAYLVTWIPGITNLIGDGISRSLGSDTGTGYRGGGYMPSELAPINITTSYQGDARMDNLVYSGSKDFGAVYKLLADPAVDLDQHPEI

SEQ ID NO: 496 - protein, 708 aa, synthetic construct
QTPISVHTPLDGDPLLHIHRRADAPPLKRAFIKTAVPLLPHLREFIESMTAARFIRPSVSPFSAPVLVIPKPLNPDGSSRGFRLVTDYRALNAQVDAVQHHIPDVHAMYEKLRHAKYVSTLDLKNGYWNAGLTEESKHLTAFSTEFGTYEYNVVPQGLVCSAAHFQKWVETKLRRHGILFEHVSVNPTLQAGLNTSALFDDKNRYIGTQPIGIAKMKGESGFVAVYIDDLIVFSGSEEEHARHLIKVMEVCSNEKLYLNTSKSHLFCKYTRYLGAICGNGELFMDPKKVEAIMKMPSPTESQTQIREFLGSCSFYRRWIDSYARLTTPLTELLKDTAKGKTRELWDKDPIKYETVIKQLKDALCSYPVLRQPDFDLPFVLYTDASDYAIGGVLCQLRENKMCAIHYVSRSLQGPEKNYSVQEKEALGIIFCVKKFRKMILGSGFKIRCLTDHRSLECLTNSKEVAGRMARWAMIMSEYNYRVEYIKGCTNTAADSLSRLIKIPEGRWTPLAPDDSDSDSEHPFLLLWPETLLLLSTYQQYWAQNDDVGNLSEHDLLMAFTEDHQIWLKKEEKFNHPLCDIDAMEQVLFSRSTVYTGDITVMTVTKELYCKCSDFADLHKYLSDIQQSKIVQSPNDYDTNPVAPPSKRQLALPMVTRSSDTEQDPPQWGLNGPCTDTRQPRGNDNRQAPAVPDVTPKRVPRSVIKAKRK

SEQ ID NO: 497 - protein, 657 aa, synthetic construct
FKDGKHGQFDCGKPLEFFNPHPDDVPAKIQLRPDAKVPPICRYRCPNNLLPEFRKYIQEMLNKGWISPGESEYSAPVLIIKKPGTYDDGSSKGFRFVSDFRAINKIVAPVTHYLPEISEMWEKLRSAKFMSVCDVRHGYWNVGLDDDAKRFLAISTPFGQTYVYNVLPQGFINSSAIFQRFLERKLRKHKILYEPKISTIRGEDSTECAGGDKTDGIDAITSDLSGVKIDTKEPNNFENEYQGFCSCYQDDIILWSASAEQHKSHILKLMKVLSEEHIPLNIQKSHFFCKFTRYLGAICGDGKICMDPEKTASVDTMVVEKNETSIRCFLGMCGFYRRWISQYARMAKPLSDLLCKDVNISKQWDERADKAVQNMKNALTTYPVLRQPDFKKPWIVCSDASDYACGGCVSQEHDGKLCPVAYCSRAFKGPELKYTVQEKECLGVIYCLKKFTQYITYCPAFQIRLMTDHYSLQFLHNQKLIATGRMARWAMELAEHNAKIYYVKGRTNYTSDCLSRLLDLSETEFDTTQNLMVLYPRFQLMIQKLLTHRPSVEGISSEIDEEKYLSFWIKKASEFDKKLDNFDISCKTNNTRSDGNAPHECVLFSTARVSINTKPLSITHEMYLKCPDFGLIYQCLHDKYKDTVSKENFKKVKHRLK

SEQ ID NO: 498 - protein, 888 aa, synthetic construct
LHKFNPTEFDMQNAMRINLKVGAEAPPPEFRKQGHHMLEIIAAQIKEMEDAGWVYRGKSVTACPIHMVRKGGTGPGEKPKWRITCDYRELNKVIQNHSYPLPEVNETIRAVREQACESHRQDLERGVANPDIPAGIDPKGHDPGVSFISVGDLAKAFYHMPVHPDDQYLTAFTVPGLGTWMYRGAPMGVKTTPSCWTEFLHKKLRRHGCLFEPGMYDPKDVIDAPETRMNDGGPRPHSYLQVYIDDVIIVTASQETHVRAWEHFIKVLEYERLSMTESKIEIGVKYLRYLGHIISHSEVFSDPKKVEAIMDLRTPRTKKECRCWLGCCNYYRPYIVNFGTIARPIIDLTTDRFGNDISAEWDSDPRYQKAFDTLKEKLCEYPILRLPDLSKPYVVCTDASNFGLGAALCQRVDGKLVVIEYASRSLVDAEQNYTATEKECLAMKWAAEKWRLYLLAAPVTFRIQPRMDKMEEVSLQAAETKASAQHRIPKGAVVMDTPNVTFQTDHSALTQLPRKRVISNSRLAGWVTSMSEFEYDVQYIPGDSRSLDTADCLSRLIRMDDEHDADKRSESARWQYANCWTEVYAKLFDRLKADDVSTIIASAPGCRDAEDTGLVNTVNATEGSKPEGGGECPDGWYPETDVPGWNNLGDIDYYTDVELQLPKYSGITEAAVQELSYGEGGGCGGEELCTAFENSFLSEFCQYGQGELTATQHTVRINNMRSSAPVCAIPILEGHDCGDCTVQPRGAEILCHQALQDEFERCHAHAYEHNTFSFAQCDGTPPEGHIYGIFAGMGEQIGDWFRTEENATLSGIAKCTGVSQHELVTFNQRHPTVQFPEPHAQPFNDKGQPRQYLRAVPFKADTWIQLTAEPAQGPEELLEGEQVRDSHA

SEQ ID NO: 499 - protein, 515 aa, synthetic construct
QHQFNPSRFDMEHAMRINLKKDCEPPPPEFRKQGHHMLEIIAAQIKEMEDAGWVYRGKSTTACPLHVVRKPTAPGEKQKWRITCDYRELNKVIQNHAYPLPEVTETIRALREQACESHRQDLENGVENPDIPAHVDKRGHDPGVSFISVGDLAKAFYHMPVHPDDRYLTAFNVPGLGTWIYRSAPMGIKTTPSCWTEFLHRKLRRHGVLFEPGMHDPDDILDVPETRMKDGGPRPHSYLQVYIDDVIIVTASQETHVRAWEHFIKVLEYERLSMTAPKIEIGVQYLRYLGHIVSHSEVFSDPKKVEAIMEMPEPRTKRDCRCWLGCCNYYRPYILNFGNIARPIIDLTTDKFGKNIAEEWDSDPKYKQAFDTLKQKLCSYPILRLPDLSKPYVVATDASDSGAGAALCQRIDGKLIVVEYASRAWTPAESRYTATEKECLAMKWAAERWRLYLLAAPVTFRIEPWRQHRTRTRVNLERTMSKQRFKADTYLKLCAEPETQPEDYEDGKLVRNSRQ

SEQ ID NO: 500 - protein, 477 aa, synthetic construct
FVHDPSKWDLENPMNIELREGEEPPPPEYRRMGPNMLAICAEQLKEFLKAGWIYRGAARTAAPVLMVRKPNADATADVKWRVTIDYRKLNNVIRKKAMDLPTCTGTIHTIREQACESYRQVIANKNGTRTSIHTDHSDRMTPSPDPGRSFLTVTDIVKAFHRVCVTPEAQELTAFCVPGLGVFKWNVAPMGLATSPAEYVEWFTKKMKRYGVLYRPGDHEPSEVLDIPELNITDGEPSPQQYCQVYIDDIILVACDIDEAVRQVKHMVRILELEKLYISLEKTVFATTWLRFLGYIIGHTDTFADPRKVEAIQGIMPCTKEHPWSKTATKSFAGMTVYYRMFVMDYAKLMRPIHRLVRDDVTPDSNVSAFWTRRLPKADPNYETEIENALGQRSPRVKEGNAYELTTQEGFEEVKRRLSQYILGRQPDPRKPFTIATDASQYAAAGALCQEHKGKMVPLEFFSKAFNKEAQRYTTCS

SEQ ID NO: 501 - protein, 802 aa, synthetic construct
FVHEPSKWDLENAMKIELEEGENVPPPEYRRMGPNMLAICAEQLKEFLKAGWIYKGAARTAAPVLMVKKPNADLKAEIKWRVCIDYRKINAVIRKRAMDLPDVPGTIHTIREQACESYRQVIANQNGSRTSIHTDLPQRAAKSKDPGKSYLTVTDIVKAFHRVCVAPESQDLTAFCVPGLGVFKWQVAPMGLATSPAEYVEWFTKKMKRYGVLYRPGDHDPRKVLDIPELNMTDGEPSPQQYCQVYIDDIILVACDIDEAVRQVKHLVQILKREKLFISLAKTVFATEWLRFLGYIIGHTATFADPKKVAVIKDILPCSKTNPWGKTAVKSFAGMTVYYRMFIMGYARYMRPLHNLVKDDIKPDSDISAHWTRRLNPTDPAYETHVENVFGQRRVRELETDTKSKKIHALTAQEGFEGTIKMLCLFIMGQQPDPNKAYIIATDASQYACAGALCQEHKGKIVPIEFFSKVFNKQAQRYTATERECLGLKHALENWSWYLLGSKFNVVLYSDHQALQALAKSKINNTRISNWQLAISPYRFTVQYKPGRSAIMAGPDCLSRLLQESWKHYRNNDNEWTTVDFYDEVPAFKQLFEKLESDDRDFLTPKVDTETVSVYQKGGGKKVSSEISAIFEIQQDRSAKEQQSFLDEGHERPQLVESLWDPVRKEDSPPGTPYDHAAERQNAYKYQQAIEYGVHTIALDPYGTTANDVMYMAEGLPLDFDDSTPDKGAIHGAQGRLKGDMYNASNNDMPVSIAKRFNINLKKLLHNNSMQHPGLKAKSKLKANTPIILQNRVIGERTMQGA

SEQ ID NO: 502 - protein, 797 aa, synthetic construct
FVHEPSKWDLENAMKIELLEGENVPPPEYRRMGPNMLAICAEQLKEFLKAGWIYKGAARTAAPVLMVKKPNADLKAEVKWRVCIDYRKINAVIRKRAMDLPDVPGTIHTIREQACESYRQVLANQDGSRKSIHTDTPKRAARLKDPGKSYLTVTDIVKAFHRVCVAPESQDLTAFCVPGLGVFKWQVAPMGLATSPAEYVEWFTKKMKRYGVLYRPGDHDPSQVLDIPELNMTDGCPSPQQYCQVYIDDIVLVACDIDEAVRQVKHLVQILKREKLFISLAKTVFATEWLRFLGYIIGHTATFADPKKVAVIKDILPCSKTNPWSKTAVKSFAGMTVYYRMFIMGYARYMRPLHNLVKDDVKPDSDISAHWTRRLEITDPAYETHVENVFGQRRPRELETDTKTQKIYALTAQEGFDGAIKNLCLFILGRQPDPNKPYIIATDASQYACAGALCQEHKGKVVPIEFYSKVFNKEAQRYTATERECLGLKHALENWSWYLLGSKFNVILYSDHQALQALAKSKINNTRISNWQLALSPYRFTVQYKPGRSAIMAGPDCLSRLLQESWKHYRNNDNEWTTVDFYDEVPAFKQLFERLESDDRDFLSPKVNTETVLESKKGGGKDTTIFKIQQDRSAKEQQSFLDEGHERPQLVESLWDPVRQEDSPPGTPYDHAAERQNAYKYQQAIEYGVHTIALDPYGTTANDVMYMAEGLPLDFDDSTPDKGAIHGAQGRLKGDMYNASNNDMPVSIAKRFNINLKKLLHNNSMQHPGLKAKSKLKANTPIILQNRVIGERTMQGA

SEQ ID NO: 503 - protein, 588 aa, synthetic construct
GAPLRRIHGTEHHINTGNAPPCYKPPYRMSPSELQAVRDQITAMLKQDIIRPSKSPWGAPAILVRRKDLHGKHQPPRFLVDYRALNSVTKSDGFPLPQVIDILDWLGGGKTFAKLDLANGYWQVPVREEDREKTAVVTHCGLFEFISMPFGLKTAGATFQRLMQATFSDFLMGNVTGSSDNQTGFCMPYVDDLIVRSMSDYGALEHYEQIFKRAAQVGMQFKPSKCTFFSTHLEVLGHIVTPNGRIPGPKKVQAISDFPVVNSQTAVQKFLGMVGFYRHHIPSFAQRTYHLRELLQKDRKFQLTAQVEAEFNDLIAALTGPDVLLRYPDWSKPFHVHTDASQLGVGAVLMQDDQHHLRPLQYASQAFSPTQKRYDTREQELYAVKWAVEQWHPYLLGRKFIVETDHANLKWLCSIAPHKAKLARWDSSLAEYDFELRHRPSRSNTIPDALSRYPVTQFIRSENSVSSATFVDILPPADVSAYLVTALGLIPYYFAPLTSTISSFTTAFALTTADTSTSPPTKAEHLSTTSQTEEPLTLLGSNRQDFITLQLQDPTLKLVHKYLSAGSKKSALHDLSSREQTRIQNLAR

SEQ ID NO: 504 - protein, 635 aa, synthetic construct
NAPSQTHAIEVHLPLKEGAVPHRHAPPRLGVEGRRFVRENVADMERRGIVYKTQSPWGSRIVLVRKKDGSLRQCIDYRDLNAKLLVQDSPLPRIDTCLEAMTEGFFNEQIAQLKKEAESPLQGAQDGSTTTTAEPADTVEAPSQPDMAGQFTNNAKFHRGAPRYWCTMDLASGFHGIPIAPESQPQTAFVTPDGKYAYTRLPFGLQCAPSYMVNLMNEVMQGLQWSICVCYMDDTLVWAQTFEEMMERLELVLERFIGANLSLKAKKCVLFATKVDFLGFRLSNQGIEVSPEKVETIRKINSEAINTLTAVRSFLGAASFYRKHIRGFASIAKPLTELTRQGVDVPVESQKEPAQTAIRTLKDALTTAPVLALPRWDMPFIVHTDACITGLGAVLCQRDEEGTERPVAYWGRVLTPAETNYNVSELELLAIISCIKHWRPYLWSASGRKFILRVDHAALLYLHTAKDTVGGGPASRLQRWYLKLQEYRFEVWHRPGRIHYDADFISRMQGSPEYARLTQEADTPDWARASEESVRRHTAARGPSLASQDTESPPEQPNVGDATTGGAALEEGGRVPHGKEEGPGKKNKTETGSPGNPSTDTETREIIALVSTDRAPAGSQLALDLSVQETFDLLA

SEQ ID NO: 505 - protein, 643 aa, synthetic construct
NAPSQTHAIEVHLPLKEGAVPHRHAPPRLGVEGRRFVRENVAEMERRGIVYKTQSPWASRIVLVRKKDGSLRQCIDYRDLNAKLLVQDSPLPRIDTCLEAMTEGFFNEQIAQLKKEAESPLQGAQEESSTATAGQAEAAVAPTQQDMADSPENSAKSYRGAPRFWCTIDLASGFHGIPIAPESQPQTAFVTPDGKYAYTRLPFGLQCAPSYMVNLMNEVMQGLQWSICVCYMDDTLVWAQSFEEMMERLELVLERFIGANLSLKAKKCVLFATKVDFLGFRLSNQGIEVSPEKVEAIKKINSEAINNLTAVRSFLGAASFYRKHIRGFASIAKPLTELTRQGVDVSVESQKEPAQTAIRTLKEALTTTPVLALPRWDLPFIVHTDACITGLGAVLCQRDEEGTERPIAYWGRVLTPAETNYTVSELELLAIVSCIKHWRPYLWSASGKKFILRVDHAALLYLHTAKDTVGGGPASRLQRWYLKLQEYRFEVWHRPGRIHYDADFISRMQGNPEYARLTRDVDTPDWARVSEESVRRHTAAHEQGSVSQDPEVQANPPNAGNATTGGAALKEGGRVPQDREESPSKKSEAKAETLPPTNPPTDAETREIIALVNTTRAPAGGRVSQAPATSEDLSVQETFDLLA

SEQ ID NO: 506 - protein, 621 aa, synthetic construct
TTSLDTLGQYSGPMGPFTFKLTTADLSSAYQRRRFQSPADTDVLRKELQKLIGSQIIEPSKSPVAANPLIVRKKDGSARVCIDYRDLNRITEPNRQPLPSIPQLFHRLLSERKANIFSTLDLAQGFHQLPIAPKQRFLTAFYGPDNKLYQYRVMPFGVRNGPPEFQPRVEEAVADEPSAFVFIDDITVGSCISDLLFHPPVQEADSSGLPTQHELVPQSWDFDVDVHLRDCRSTCLALKRSGWTIKWQKCRWGYFVAQQLGHYVSSFGLQPMADKIAAIVSVRPPTTPTEIKRFLGMVNYYRDHLKDLSAIAAPLNALLRKDVPFLWAAEQQGAFEHVKRLLISAPVLRPADVFKPFVVTCDWSAVGMAGTLEQVDEESRLYVVEYWSKTCTPAEAKYGSFKGEAATLVFVTQHWRHYLVNNLENLLRSDNSALQWLTSSPNLPAQAARWALLLHDVAFRVVHLPGKDNVVCDFLSRPCGAASKPPTAPLGCGSRSWSSSTRSPSSPTASCVCSSSVYPATQCGPSAPVSGEVRSVTAGIPASYEPDPKEIVATFCSGVFVIFDDNGPVVSSSSPSREVWFDTNTLDYLRAAAGPSPETACAAQLLRLLPVEKARVVSRSR

SEQ ID NO: 507 - protein, 521 aa, synthetic construct
EASHEFPPSRVWDHAIELKPGAPSSLPGKLIPLSQPKLAELRKFIKEHLGRGTISPFKSPYTVSFFFIKKKDGKLQPIQDYRPINNWMIKNKYPLLLIPQLVDCLRGCSLYTKFDIQWGYNNVHIKEGDEWKAAFMTNEGLFEPTVMFFGLTNSPATFQAMMNSVFAPEIAEQWLTVYMDDMAIHTAKLPDKMDEQHLQHRELVKRILAKLQEHNLFLKPEKCTFKQPTIEFLEVKVDQGTVQMDDVKIAKVKNWITLHNVTEVCKFLGFTGYYRYFIQDYSKKARPLLYLTHNSTPWQWGQDQQMAFETLQDAMCNKPVLRQPDFTKPFYILTDTSAYGMGAILLQEGKSAILQIETPHKKPELHPVAYYSTTFTETECNYNIYDRELLAIMKAITHWRPYLICMEEPFTIYTDHANLLYWKSLHKLNQRTAHWHSELQDYHFMLEHIPGKTHTAADALSRPSGSDKGKQDNQQITILPEATFIQLADADSDGSLESMITDCESQYEATMKEWEDTYPIT

SEQ ID NO: 508 - protein, 695 aa, synthetic construct
GPPSGLPPDRGIELVLETGSRPMPRTRPLKRLSEGELAELRRQLRDLLDRGWIQHSTAGHAAAVVFARKPDGSWRICYDYRGLNAITEPQVEPLPHIDSLLDETRGAKWFTKFDLAQGYHQVRLREADWWKTSFRSQLGQFEWKVMPFGLQGSSSVLMRVMNAAMTRGLRTNAGGEDAESRPGDTSVPGAIARSDLTQGHRGVPGASGPLHRSVVVYMDDLLCYSSSLEQHLRDVREVLAILRQEKLYVKASKCAFGREELGFLGHRVSGAGVSVDPRKVAAVREWPAPPSNVELRQFVGLCNYYRRFVKGYADIAAPLTRLCGPHAPWHWGPVEQQSFDTLKCCLTTAPVLRTFDPGRRSVLTTDASETAISAVLTQPDDAGHHHPVAYESRKLAAAEQAYLPHVLELLAVVHALRVFRHYLLGSGAPRPPGVLSDFTLRTDNQAVSWLRTKRDINRFMARWLDEIEEFRFDIEHVPGRLNPADPLTRRSFPGAAGTGGGPTAVVDPNLTTAVAAVFIPDSTAAPGQGQGLAAAAGPTPTTAAAAVVTPGSAGTAPGPGGLAAAAGPTPTTAAAAVVTPGSAGTAGLREGHDVANGPNPTTAAAAVVIPGSAAAADPGAASHIPTAFTSLAGAQVWLATGVFTVPAGPTQSERHFLTPNFVAAWSRETLVDPFFGAIFKGAAATVGGAVDCRGR

SEQ ID NO: 509 - protein, 665 aa, synthetic construct
GPPSGLPPDRGIELVLETGSRPMPRTRPLKRLSEGELAELRRQLRDLLDRGWIQHSTAGHAAAVVFARKPDGSWRICYDYRGLNAITEPQVEPLPHIDSLLDETRGAKWFTKFDLAQGYHQVRLREADWWKTSFRSQLGQFEWKVMPFGLQGSSSVLMRVMNAAMTRGLRTNAGGEDAGSRPGDTSVPGAVAWSDLPQGHRGVPGASGPLHRSVVVYMDDLLCYSSSLEQHLRDVREVLAILRQEKLYVKASKCAFGREELGFLGHRVSGAGVSVDPRKVAAVREWPAPPSNVELRQFVGLCNYYRRFVKGYADIAAPLTRLCGPHAPWHWGPVEQQSFDTLKCCLTTAPVLRTFDPGRRSVLTTDASETAISAVLTQPDDAGHHHPVAYESRKLTAAEQAYLPHVLELLAVVHALRVFRHYLLGSGAPRPQGVLSDFTLRTDNQAVSWLRTKRDINRFMARWLDEIEEFCFDIEHVPGRLNPADPLTRRSFPGAAGTGGGPTAVVDPNLTTAVAAVFIPDSTAAPGQGQGLAAAAGPTPTTAAAAVVTPGSAGTAGLREGHDVANGPNPTTAAAAVVIPGSAAAADPGAASHIPTAFTSLAGAQVWLATGVFTVPAGPTQSERHFLTPNFVAAWSRETLVDPFFGAIFKGAAATVGGAVDCRGR

SEQ ID NO: 510 - protein, 456 aa, synthetic construct
DYNEMSGLSWEMVELKLPIRPDKKPVKQIPRRFAPQILSKIKEEIERLLKSKFIKTARYVDWLENIVLVKKKNGTIRVCIDFRDLNLATPKDEYPMPVAEMLVDSAAGFEYLSMLDGYSGYNQIFIAEDDVSKTAFRCPGTLGCYEWLVMPFGLKNAGATYQRVMNSMFHDFIEKFMQVYIDDIVVKSSSEDDHLNHLRQSFKRMRQYGLKMNPLKCAFGVFAGDILGFVVHKKGIEINQNKTKEIMETKAPSTKKKLQSLLGKINFLGRFISNLSGRAQAFSPLLRLKKEDIFKWEPEHQKAFEEIKSYLVNPPVLSPLLKDKRMKLYIAASECTLGSMLAQEDENGVERAIYYLSRVVNDAETRYHPSEKLRLCLYFSCTKLKNYIKHFDVYVYSHFDIIKHMLSKPNLHSRVGKWALALTEYDQSLKSVKGNIVADFIADHSVIEPSLNGAND

SEQ ID NO: 511 - protein, 491 aa, synthetic construct
TIFLEMKGIVKDLGEMKIPLKPDTNSMKQYPYRLTPLYKEKENMELDRMLEAVIIERVEESEWISMIVVQDKKTTSEVHICIDLRKLNNTCLHDSFPTLFTDEVLESVGGQEVYSFIDGLYGYHQVQIAKEYRHKTTFVTEWGCFQYTLIPFGLKNSLVIFSRLVVAAFKYFIRNFLEVYFDDWTVFGLIKYHIGSLRMMLEWCRQYQILLNLKKCIVCALFGILLGHVVRHDGIMVNLAKITTIVDLPPPTTVKQLRTTIKQLRRTLGHTRYYQKFIKGYAEVNNPMEKLLKKCVKFQWSEDFQESLYTLKKKIVTTPILVFSDKKEFIYTSMHCLLHSTLYLRNLENGQLIILFPLLARNYKKKRINTLKLKEKDFPWCMHFRNFDTICLLGGHFKMFIDHSTLKNLVNNPMLGGNIFRWLLLFQDFDFEVIVKLGRLNLGPNHLSRLESGEEIVNINDNLPDAQLFSIMMFDNCYKEIIHLLSVIYPP

SEQ ID NO: 512 - protein, 515 aa, synthetic construct
SLADLKGISPAFCTHRIPMEEDHKPVVDNQRRMSNEMRSVVKKEVIKLLNAGIIYPVPTSEWVSPVHCVPKKGGLTVVKNDKNELIPQRTVTGWRMCIDYRKLNKATKKDHFPLPFIDEMLERLAKNTHFCYLDGYSGFFQIPIHPDDQHKTTFTCPYGTFAYRRMPFGLCNAPASFQRCMMAIFSDFIEDIMEVFMDDFSVHGTSFDHCLRNLEKVLKRCEEVDLVLNWEKCHFMVTRGLVLGHIISEKGIEVDKAKIETVEKLPPPTNIKSLRSFLGHAGFYRRFIKDFSKIAKPLTYLLQKDIPFEFTEECEVAFRKIKELLISAPIIQPPDWNLPFEIMCDASDYAVGAVLGQRKNGKVHVIYYASKTLNEAQVNYATTEKEVLAVVFAFEKFRSYIVNSKVIVYTDHAAIKYLLTKKDAKPRLIRWILMLQEFDVEIRDKKGVENVVADHLSRMDHGKDGSPIEDALRDDTLYAVLDKDSWMRDVIRAIRGEPLPHLNYNSKRRVLAEAK

SEQ ID NO: 513 - protein, 520 aa, synthetic construct
TLADIPGISPTVCTHRILLEEDAKPKRQPQRRLNPLILDVVKKEVTKLLSAGIIYPISDSEWVSPVQVVPKKSGITVIKNDKDELIPTRVQNSWRVCIDYRKLNEATRKDHFPLPFIDQMLERLSGKSHYCFLDGFSGYFQVPIAPEDQDKTTFTCPFGTFAYRRMPFGLCNAPGTFQRCMMAIFSDFLENSMEVFMDDFTVYGSSFEECLKSLTKVLKRCIEKNLILNYEKCHFMVNRGIVLGHLISEKGIEVDKAKIEVISSLPYPTNQREVRSFLGHAGFYRRFIKDFSKIARPLSALLQKDIDFVFDDNCRNAFNELKAKLVSPPILVAPDWELPFEISCDASNSSVGAMLGQRKDKVSRVIAYASSTLNAAQINYTTTEKELYAVVYALEKFRSYLLNSKVIVFTDHAAIRYLFQKPHSKPRLLRWSLLLQEFNLQIKDRVGAENHVADHLSRLPLTSQGVDISNLEIDSFPDALFCAMVSKEPWYSHIVNYLIAGVIPPVMSYSQAQKLKSEAK

SEQ ID NO: 514 - protein, 517 aa, synthetic construct
TLADIPGISPSMCTHRIILEDDAKPSREPQRRLNPPMMEVVKKEVIKLLDAGIIYPIADSKWVSPIHVVPKKSGLTVVENEEGDQVPTRIQNGWRVCIDYRRLNKATKKDHFPLPFIDQMLERLAGNPFYCFLDGFSGYFQIPIAPEDQEKTTFTCPFGTFAYRRMPFGLCNAPGTFQRCMLSIFSDYISKFIEVFMDDFSVFGDSFDSCLDHLSQILEKCIESNLVLNFEKCHFMVSKGIVLGHLISENGMEVDKAKIDVIKTLPYPKTVKDVRSFLGHAGFYRRFIKDFSKLAQSMCQLLKKDEKFEFGDKCKRSFDDLKEKLCSAPIIKVPNWELPFEIMCDASDTSVGAVLGQREGKDPHVIAYASRSLDNAQRNYTTTEKELLAIVFALEKFRSYLLGTKVIVFSDHGALRHLMKKKECKPRLLRWILLLQEFDLEIKDKKGCENLVADHLSRLPLKIEDLVPIREEFPEEHVLAAQVESPWYADLANYIVTKKFPPNFSKAQRDKMKSNAR

SEQ ID NO: 515 - protein, 521 aa, synthetic construct
SIADIKGIRPTLCMHRILLEDNVMPKRDTQRRLNPNMRRWVMKLLDVGIIYPISDSKWVSPVQVVPKKSGTTVVKNEANELVPTRMTTGWRVCIDYRKLNTSTSKDHFPLPFIDQMLERLASHSHYCFLDGYSGYNQIAIAPEDQEKTTFTCPFGTFAYRRMPFGLCNAPATFQRCMMSIFSDMVERFIEVFMDDFSIFGDSFDQCLHNLSKVLARCEQSNLVLNWEKCHFMVNQGIVLGHVISSKGIEVDKAKIDLIASMPSPTSVKEVRSFLGHAGFYRRFIKDFSKIARPLCNLLAKDVDFVFDRDCENAFNALKKMLTAAPIIMPPDWSLPFELMCDASDYAVGAVLGQRVHKKPHAIYYASRTLNDAQLNYSTTEKELLAVIFALEKFRSYLITNKVIVYTDHAALKYLIAKKDAKPRLIRWILLLQEFDLEIKDKKGSENVVADHLSRLVHVSNEEEDSLPLRESFPDEQLFSICALNSLNPLPWFADIVNYLCTNELPTGLSTFQRDKLRKQAR

SEQ ID NO: 516 - protein, 517 aa, synthetic construct
TLKDIKGINPLICTHRIHLEDNARTSQQPQRRLNPHMKEVVKAEVLKLLDVGIIYPISDSKWVSPTQVVPKKSGITVVKNEKGELIPTRVPSSWRMCIDYRKLNTATRKDHFPLPFLDQILERVAGHPYYCFLDGYSGYYQIPIALEDQEKTTFTCPFGTFAFRRMPFGLCNAPATFQRCMLSIFSDMVEHYLEVFMDDLTVFGNSFDNCLDNLENVLKRCEEKGLVLNWEKCHYMVASGIVLGHVVSSKGIEVDKAKVEIISHLPPPKTVREVRSFLGHAGFYRRFIKNFSTISRPLCNLLLKDASFDWNQDCQKSFEKIIGHLTSAPIMQSPDWSLPFELMCDASDFAVGAVLGQRKEGKPYVIYYASRTLNSAQMNYTTTEKELLAVIFALDKFRSYLIGSSTIVFTDHAAVRYLMSKQDAKPRLIRWILLLQEFNITIKDKKGVENVVADHLSRLTTESSFDITPINDSFPDDFLFSVTTIPWFANIVNFLVTGEMPSQWTPQDKRKFLTEVR

SEQ ID NO: 517 - protein, 516 aa, synthetic construct
SMSDIKGISPTIVQHRIHLLEESKPKREFQRRLNPVMKEAVKKDILKCLDNGIIYPISDSTWVSLVQVVPKKSGITVIKNQENDLVPTRIQTGWRVCIDYRKLNAATRKDHFPLPFIDQMLERLAGHDYYCFLDGYSGYNQIPIAPEDQDKTTFTCPFGTFAYRRMPFGLCNPPATFQRCMLSIFSDMAEKNLEVFMDDFSIFGDSFEQCLHHLNLVLKRCKEKDLTLNWEKCHFMVRQGIVLGHIISKNGIEVDKAKIILISSLPHPKNVKDIRSFLGHAGFYRRFIKDFSKIARPLTKLLSKDNPFNFSSECITAFELLKKQLISAPIMHAPDWSKPFELMCDASDFAVGAVLAQHIDNKPHVIYYSSRTLNDAQLNYSTTEKEFLAVVFALEKFRQYLIGSEITIFTDHSALKYLLLKKDAKARLIRWILLLQEFDLKIKDKKGADNVVADHMSRLQNIPNSEVPINDFFPDEQLFTILKEPWFADIVNYLVTRKIPAEWSKQDRYRFYSEMK

SEQ ID NO: 518 - protein, 647 aa, synthetic construct
PLRVEDETKINPEVWYTPDTVGKLNVEPFMVTIRDPEVPVRIKQYPIPLEGRQGLKPEIQRLIKQGLLEPCMSPFNTPILPVKKADGGYRLVHDLREINKRTVTRFPVVANPHTLLSQLGPNDRWYSVIDLKDAFWACPLKEECRNYFAFEWEDPDTHRKTQLRWTVLPQGFTESPNLFGQALEQILQDYQIGDTLTLVQYVDDLLIAGEDEERVREESIKLLNFLSLKGLKVSKSKLQFVEKEVKYLGHRLSQGTKKLDPERVKGILSLPSPKTKKQVRQLLGLFGYCKQWIEGYSGKVKFLYTKITKNGLLKWTQEDDQRLKELKTELVNAPVLSLPDLKRPFFLFVNTEEGTAFGVLAQEWAGKKKPVAYISKLLDPVSRGWPTCLQVVVAAALLVEEAHKITFGSELRVLSPHNIRGVLQQKAEKWITDARLVKYEAILITSPHLTLETTSLQNPAQFLYGEPSQDLFHDCLRNIEEQTKIRPDLEEEELGKGEKLFVDGSSRVVEGKRKSGYAIIDGKTFKVIESGPLSPSWSAQACELYAVLKALQLLNGKVGTIYTDSRYAFGIVHTFGKIWEERGLINSRGKSLVHQELISQILQAIRGPSEIAVVHVKGHQRGLNPLVRGNNLADQEAKRAALSALDL

SEQ ID NO: 519 - protein, 649 aa, synthetic construct
ALTEVDEQEIADKVWAEKGGASRMQISPIQVQVKPGVTGLCTPQYPMSRKGREGLKPVIERLLEQGMLEPTMSPFNSPILAVAKKDGKYRLVQDLRNINKVIVPRFPTVPDPYTILGMIPTEHRWFTVIDLKDAFWSCPLDEDSRPLFAFEWTDPETGKKGQLRWTVLPQGYTESPLLFGQALSEKLQEFDKGPGITLVQYVDDLLLSGKKREEVRQGSIRLLNWLSNQGLKVSKEKLQFVEQKVKYLGHYLQHGTRSLDPERIRGIMELQPPRNKTEVRKALGMIGYCRLWLDQYAVLAKFLHQKLEGPGDQVEWVETDSQKWETLKEALTSAPVLALPNSKLPFHLYVSVAQGVAIGVLAQKRGGKYQPVAYLSKELEPVVKGWPVCVQAVAAAAVLVIGSKKLTFGGALIVHSPHQVNPVLSQLATTWMTEGRLLKYETILRTSPDVVIGTDRNLNPAEFLSGERKEWEPEDHDCLSLVEMLTKVREDLEETPLEEGEKWFIDGSSRVEEGKRKSGYAIVDGVGEVIEKGALSPTWSAQKCELYALARALELAEGIRATIWTDSKFAWGVVHTFGKIWQERGYIKANGKEVEHVQLVDRTLEALKLPDKVAIVHVAAHQKGDTPEIVGNRWADKWAKEAAGELTLA

SEQ ID NO: 520 - protein, 653 aa, synthetic construct
PLTMDDQNQINPDVWYSPDTISKLEIPPIKIQISEPHIPVRVKQYPISLEGRRGLKPEIDRLLTQGILEPCMSPFNTPILPVRKPNGKYRLVHDLREINKRTITRFPVVANPYTLLSKLGPHNSWYSVADLKDAFWACPLAEECRDYFAFEWEDIETGRRQQLRWTVLPQGFTESPNLFGQALEELLKEYQVQTGNVLLQYVDDLLIAGNNKEDVRKESIRLLNFLAQKGLRVSQEKLQFVEEKVKYLGHYLFNGKKILDPERIKGILELPMPVTKRQIRQALGLFGYCRQWIENYSFKVKFLYEQLSKDKILKWTPRDQEQFANLKRELSQAPVLSLPDLKRPFHLFVNIHEGTAFGVLTQEWAGQKKPVAYLSKLLDPVSRGWPSCLQIIVAAALLLEETNRITFNGEVVLYAPHNIRGVLQQKAEKWLTDNRLLKYEGILIESPKFSLKTIGAVNPAEFLYPGEGNELLHNCFQTIEQQTRIRPDLEEEELQCGEVLFIDGSSRIVEGKRLSGYAIVKLEKGEFKTIESGPLSASWSAQACELYALWKALVSLKGKDGTIYTDSRYTFGVVHTFGKIWEERGFINSQGKELIHPELIRRVLGALKVPNKIAVVHIKGHQRGTNYQVRGNNAADIEAKRVAGNYNTILTIQ

SEQ ID NO: 521 - protein, 648 aa, synthetic construct
PLRVEDEKEVNPEVWYTPETIGKLQIPPFSVTIINPEVPIRIKQYPIPPEGKWGLKPEIERLLEKGLLEPCMSPFNTPILPVKKSDGSYRLVHDLREINKRTVTRFPIVANPYTLLSRIGPENHWYSVIDLKDAFWACPLSEESRNYFAFEWEDPETHRRQQLRWTVLPQGFTESPNLFGQALEKILQEYVVNENTILIQYVDDLLIAGKEEAIVRQESIKLLNFLALKGLKVSRSKLQFVEEEVKYLGHYLSKGEKRIDPERVKGILSIPPPTNKKQIRQLLGLVGYCRQWIENYSSKVKFLYNKLSQDNLLKWTMEDEQHLEQLRKDLITAPVLSLPDLKRPFSLFVNTDEGTAYGVLTQDWAGKKKPVGYLSKLLDPVSKGWPTCLQAVVAAALLVEEANKITFNGELRVLSPHNIRGILQQKAEKWVTDSRLLKYEGILIDSPKLSLEVTTLQNPAQFLYGEPWDSQLIHDCFITIESQTKIRPDLEEEELGEGEKLFVDGSSRVVNGKRKSGYAIIKGPNLKVLESGPLNHSWSAQACELYAVLRALEYLRNKVGTIFTDSKYAYGVVHTFGKIWEERGLINSQGKDITHQELIVQILKALRSPKGIAVVHLKGHQKGVDIRNRGNNVADREAKRAALKDWTP

SEQ ID NO: 522 - protein, 656 aa, synthetic construct
VLREEDEKKINPIVWAKPGNPGLMNVTPAKIHLKTDTPVYRPQYPIRPEAEEGLKPVVRELLDDGLIEPSDSPYCTPILPVKKPNGTWRMVQDLREVNKVVIPRAPIVPDPHTILRRIPDTHVWYTVIDLKSAFFSVPVDPESRPIFAFQWPHPETGKLTRFQWKILCQGYCESPTIFGEILEELLQGWSPPEGTLLTQYVDDLLISGEEGKQVRKASISLLNFLGEKGLRVSLDKLQFCEPEVKYLGLILKKGTKCINPKRLEGIQNLEMPKTKRQLRSFIGTINFCRQWIEGFSELIQPFLKKLLKEEPETLVLEKADYKLFERVKKVLVSAPALGLPNPNKPTHLFVTTGNGVAKGVLAQKKAGQYQPIGYLSKHLDAVVLGWPTCLQACAAAAELVKLTRKLYPFEAIVLHSSHQLKTILTHTARRWMTDSRLLQIEAILLEKPDLLLTTTDHYGPAGGLSEAVRKEMCNEHDCIAITDLQTKFREDLQEEPIEGAWNLYTDGSSRVVNGKRITGYAIVEDGGLEVETGPLPPSMSAQTAELYALKRALEIGKEKNVNIWTDSKYACGVVHVFGKIWSERGLLTSQGKNLAHHRLVLDTLEALSFPSRVAIIHIPGHQKGNAPEIVGNRLADELARRAAEREFDTARLAALI

SEQ ID NO: 523 - protein, 645 aa, synthetic construct
EGADEILNKIPEGVWSTGPYDVGFCKKYKPIELTVSDTQVVYRKQYQWPAEADSGMEETLRGLWQAGVLEESHSLWSTPLRPVKKADGVSYRMAHDLRAINDAIMTPVLPVPDPHRILTSLSPNLKWFTVIDLANAFFCLPLHPNTRKYFSFTYKHTRLQYNRLPQGCKNSPGLFNQALKDMLSDLQLPNNCVLVQYVDDLLLACETPEVCLEATKRLLLKLHSCGFKVSRKKLQCCRKAVNFLGRVVSAHGSTMSTAHRNAILHHPKPETVKDMLSFLGLCGYSRNYISCFVERIAPLRALIREKGNKNTTAQLNWTEEATNCFISLVGALASAAALAVPNYDLPFHLNVSLSASVVNGVLFQKRDGGRCVMMYCSTTLDPMEQKQPQCTRYAAGLATLITKTAHIVKGYPLNILTEHSVSAYVASASFTMSSLRQTRLMKILQAPNIQYVHTGINMADCIGATGTPHTCVFQVQQDLKLRPDLQTSPLGRGHLAFTDGCCYRQTDGSLRAAAAVVRYDSGSDVFTTVATVQLPDSPSAQAAEVLALCLALEAYVDQEVTVYSDSAYAVSAAVLDLAAWKRTGFVTAKGVPIAHRSLMERLAVSIMLPRAVAIVKTAGHSKANTMTARGNDAADRAAKKAAGYQ

SEQ ID NO: 524 - protein, 649 aa, synthetic construct
TPEEKETLLADVPASVWAKDSYDIGTLTTAPPLIIKAKPLSRYPAKAQYPLSKEAEEGIEPTFNALLERGAIVPCPYSPCNTPILPIKKPDNTWRFVQDLRLVNEAVEPRHPIVPNPCTILSTIPSNAKCFTVIDIKNAYFSIRVDPASQFWFAFTYKGQRFQWARLAQGYVESPSYFCECLTECLSKFTPPGGSTIISYVDDILLSSPSKKVCKMDTVALLTYLAIVGLKVSKQKLQLCQERVKYLGHILTPGSRALDASRISAITACPRPKTKQQLLRFLGMTGYCRAWILHYAERAQPLQSCANACKNLTDNLTWTDDCDKAFVDLKVALASTPALGLPNYDLPFHLFVCEKAGFMSGVLCQQHGGQYRPVAYLSKHLDPVARGMIPCLKAVAAAASGVLSCADLVLLHPLTVHVPHEVHSLLMQAKTSHLTPARLLSYQHVLLTLSHVTLARCTSLNPATLLPTPDDGDTHDCCEVVSICTKPRPDISEIPLTNPDLVFFVDGSSMRLGSGEVGSSYAVVNHFEVVEAYSIPGTYSAQAAELVALLRACILAKGKSVCIYTDSRYCWGIVHDHGAIWKERGFLTAAGKPIQHKDLIASLLEAIQFPASVAVIKCTAHSNHKDEVSSGNNRADAAAKAAAKGGQRI

SEQ ID NO: 525 - protein, 652 aa, synthetic construct
NHVRADEMLATIPESLWTSHPHDVGRIEGEVVLTLKPTVTKPIWRAQYKLKPEQVEGIAETVTGLLRAGVLREAEGARWNTPILPVPKAGNKGWRMVHDLRLINEATTTLALPVPDPYVALRAITPEQKFFSVCDLGNAFFCLPLAEECQEWFSFTYGNKQYTYTRLAQGYKDSPGLFNQALNQILENMILPEGATIIQYVDDLLVATKTAEDSLAATKTLLMTLADAGFKVKREKCQITRRSVEFLGRIVGEHGTAMSDMHQDAILQYGKPKTVQDMLGFLGLCGYSRTYVPEYVTLTQPLREMVTEVGHRALKDDLNWTVDRDKAFQKVKSALSAAAHLASPNYEKDFYLDVAETEGIVNAVLYQRERGERKILSYFSCKLDSVEVGKPPCIRFLAALAKAIEKTAHIVLCHPLIVNTDHSVTALLASSAFSFSATRQIKIDDTLKGPHIMFKAPKDNHANMAKGVNGGGLLQHDCIRRVEGDSKLRENLHATPLDDPDWELFTDGCSYKSDIGNRAGYAVVKWDNDKADIIQAGEIPQPASAQVAEIKALTEALKLSAGHKVNIYTDSAYGFGAVHYEGPAWVRRKFLTAAGTPVKHEHHLRELIEALNGPTEVAVIKVTGHSKKNDKESNGNAAADAAAKLACNYPVK

SEQ ID NO: 526 - protein, 650 aa, synthetic construct
NHPDSDDIINAMPASLWSTGPADVGKLQIPPIKINLKPDTVPIWKYQYPLSREKIDGIRPVIEDLLRSGVLRQTVSDWNTPILPTPKPGKNVYRMVHDLRPINQVVLPSHCKTPNPFVMLTSITPDHKFFTVIDLANAFFSVPLHEDCQNIFAFTYENSQFSYTVLPQGLKNSPSLFNNILKTHLSELTPHLPPNTVILQYVDDILIAAPSTAKNLQATSLVLHFLATKGYKVSKDKLQICRPTVHYLGRLITSGATSMSPEHKSSILNHPKPNTGKSLLSFLGLTGYSKQFVPNYQDLVSPLRALIRQKGYANLNAPLHWTPEAEICFTALKQALAQATQLNPPDYSLPFHLDVSEQEGTVKAVLYQKQGGTRTVLMYYSSKLDNVEIGHPPCTRHCAAIAKALIKTAHIVMQHTVHVHTNHGVAAFLDSTAFTLSTKRQQKLKNILDQPNVLYTSEGVNMAAEISTQGEPHDCAVLAETDMKIVETLTPNPIENPDLVLFCDGSSRRRLDGTLSAAYAVVKLVPKSQLVTIEATHIGNNSAQKAEIMGLTAALNHAHGKTVNIYTDSAYAHHAVYVDLPHWSRKGFVTATGTPIKHLPEIIALQEALSRPKGVAVLKCKGHQSDNTIVAKGNAAADESARRLTEDDKI

SEQ ID NO: 527 - protein, 650 aa, synthetic construct
TPSIPNLHGVPSSLWATHKEDAGLVACAPYEASIKHTDPIYKKQYPLTEEKALGIDKVLHQLLLQGVVVPCKSPYNTPINPVKKPDGTWRLTQDLRAINDIIIPVSPIVPDVPNIMASIPSSHTHFSVVDLCSAFFSIPVEPQTQPLFAFTHRGRQYTWTRLPQGFVDSPAVFALTVRQCLTDVCLPPNSCFLQYADDILVTGQDEATCHQATIAVLQRLAETGFKVSPSKLQLCKTSVTYLGYLISQGSKALTPSRVSIILEGKKPATKQAMMAFLGLINYCRQWIPDCSYYDKCLRSAFTHSDPMSSLITWTEEMTQAYGALKKALCSAPALGLPNYDLPFHLYVTHHADTASAVLAQEHGGSFRPCAFLSKTLDTVAQGLPTCLKAMAAAALMVLDAEKLVLGHPLVLHCEHQIQYMLKHLSTQHLSVQRRCGYEQTLLATENLTIKPTSSMDTVAHALQRFLQVPADHFSEDHNCVDSVVSDCSLRPDLKSTPLQNVRNLYVDGSCSKPQDGVYLTGYAVCELPDTVLEAAAIPFSSAQAAELIALTRACVLAADQDVNIYTDSRYAFGVAHDFGAIWASRGFVAADGKPISHSSLVMDLIKAARLPRSLAIIKTRGHSTFDTEEAKGNNFADTQAKLAAQSGKQP

SEQ ID NO: 528 - protein, 660 aa, synthetic construct
STQMESDSKREEMLQKVPECLWSQHSTDIGLVKSAQPVKVELRPGTSPPWKNQYPLKEEAIRGIEPQIEGLLKADVLKITQNPQSNTPLLPLKKPDGSYRLVHDLRAVNEVVADFPAEVPDPHTLLAQIPPDATHFTVLDLCGAFFSVPLSIESQGFFGFTYNGQFYESKRLPQGFKHSPHIFNKVLREDLAGIDQILKSTVVQYVDDIIICSPDEETCHKDSIKLLQILAEKGHKASQKKLQYCREKVIYLGQTITKGHRSISDSHLEAIRKAPKPRTVREMLTFLGIAGYSSSWVEDYASLTGPLRAMIKDTGNAQLHCNLSWTQDGLLAFETIKQRLQEAPALALPDYSKNFLLYVSTSTGGRYACAVLCQPTGTGTTPQPISYYSTAFSEVELGLPLCYRALVGVSLMYDKASSVTMGYPVTILTHHSVRNLLNYGKYTLTMSRLRDYHRLLEQEDVTLVRCVTVNPAESLPTSEDGEPHDCIQESEKYSKLRSDLQALPLSEADVEYWTDGSCYRVGDKLSAGYAVVKAQGTEFVVEKAGIVPQPASAQLAELVGLTEACLLAEGKRVTIYTDSAYAHNVCHLFGAVWKNRGFKKTDGSPIQHHAQIMKLLHAMMKPKEIAIAKCAAHKMDVSKVTQGNKAADEAAKAVTGADKL

SEQ ID NO: 529 - protein, 651 aa, synthetic construct
SLTPFEREALLASVPESAWAKDSYDFGTLTTAPPLVIHAKPGSHFPAKAQYPLSKEAEKGIEATFKALLERGAIVPCPSSPCNTPILPIKKPDNTWRFVQDLRLVNEAVQPRHPIVPNPCTILSSLPPDVKCFTVIDVKNAYFSIRVDPSCQFWFAFTFKGQRFTWVRLPQGYVESPSYFNESLVFCLSKFTPPGGSTIISYVDDILVASPSKEMCKMDTVALLTYLAIVGLKVSKQKLQLCQERVKYLGHILTPGCRALDASRISAITACPRPRTKQQLLRFLGMTGYCRAWILDYAERAQPLQTCANACKHLTDHITWTDDCDKAFVDLKLALASAPALGMPNYDLPFHLFVCEKAGYMSGVLCQQHGGQYRPVAYLSKQLDPVARGMIPCMKAVAAAASGVLSCADIVLLHPVTVHVPHEVHSLLLQAKTSHLTPARLLSYQHVLLTLSHVTLARCTTLNPATLLPTANDGDTHDCCEVVTMCTKPRPDISETPFSNPDLIFFVDGSSMRLGSGEVGSGYAVVNQFEVVESYSLPGTFSAQAAELIALFRACILAQGKSACIYTDSRYCWGIVHDHGAIWRERGFLTATGKPIQHKDLIASLLEAIKFPTSLAVIKCAAHNNTSDEVSLGNNRVDAAAKAAAKGGVRI

SEQ ID NO: 530 - protein, 651 aa, synthetic construct
PLSEEHNVLLACIPHDLWSQHKTDVGLVRSAQPVHIKVKTGIMLPYKRQYPLKPHQTEGIGPTIKGLVAAGVLKTTKSPCNTPIFPIKKINSGDYRLVHDLRAINSIVDAETPVVPDPHTLLSNIPHDACWYTVIDLCSAFFSVPLHPDSQYLFAFTYKGQQYTYTRLPQGYVESPSVFNRVLANDLQHLDVTSTVLQYVDDLLVCSNTQEQCTQDSLTVLKALEKGGHKVSKDKLQFCQPQVEYLGRQLCGNKRAIAPSQIEAVSKAPKPLTVSHMLSFLGMTGFSRPWICDYAIKTAPLRGLIRAAGQNNGSAVLHWTTEAEGAFQALKQDLQTAPALGNPNYANMFHLYVAEKSGYACAVLMQDTPTGKQPLAYYSTKLDNIEMGLPPCYQGLAAAAFAFQKASAITMGHPTTLYTSHQLHALITSPRFVLTQARKTGYEVILAAPELNIQRCATINPATRMVIPLEGTPHDCIRSTDEFLRPRQDLHNQPIPAELTLFVDGSCFRDNTGNHAGYAIVQLHPDDTFTEVQTIKLAQPCSAQLAEIKALTAACQLAAGKTLNVYTDSQYAYAVCHIHGVIWKQRGFLRADGSPVTHGEAISALLDAIHHPKALAIIKCAAHQKIDSLIAKGNNLADEAAKRAATSTCIG

SEQ ID NO: 531 - protein, 650 aa, synthetic construct
CLSLEEQETLFASVPDSIWAKDDYDFGTLSTAPPLVVHARTIYYPSRAQYPLSKEAEQGIEPVFTSLLNRGAIVPCPSSPVNTPILPIKKPDGTYRFVQDLRIVNDAIHSRHPIVPNPCTILSSLPATATWFTVIDIKNAYFSIKVDPASQFWFSFTFKNERFTWARLPMGYSESPSVYNEAMVACLRNFTSPAGSTVISYVDDILIGSPSKEACKIDTVALLTYLASVGLKVSKHKLQLCQEKVKYLGHILSPGNRALDATRITAITACPRPRTKQQVLRFLGMTGYCRAWILNYSEIAQPLQLCATACKNLTDVVTWTDDCETAFRKLKQALASAPALGLPNYDLDFHLFVCEKGGYMSGVLCQLHGGKHRPVAYLSKRLDPVARGWVPCLKSVAAASSAVLACADLVLLHPLTVHVPHDVHALLMQAKTTHLTTARLLSYQHVLLALSHVKLVRCSLLNPSTLLPTEEDGESHDCCDVITICTKPRPDISEEPLSNPDLLFYVDGSCLRLDSGEVGSGYAVVNHIRVVESYSLHSSFSAQSAELVALIRACILASGKSVCIYTDSQYSWAVVHDHGAIWKERGFLTAAGKPIQHKDLIELLLKAIQLPTAVAVVKCAAHTKNNDEVSLGNARADAAAKSAAKGGVRN

SEQ ID NO: 532 - protein, 653 aa, synthetic construct
FNSDLGTDILTQVPDQLWSRHETDVGLAVSASPVVVKLKPGAVLPWRPQYKLNPADEEGIANLIDGFSKAGVLVEISSPCNTPILAVLKADKSKYRLVHDLRAINAILEEVAADFANPHTLLNAIPTKAKFFTVIDLCSAFFSIPLAEESRYLFSFTFRGRQYSYARMPQGLTSSPAWFDRVVSQDLQELDLSGVIIRYVDDVLVCSDTIEDCQRDSIKVLQRLAECGHKASRTKLQFCQPQVEFLGRVISHGTIALSPDHLKGISRAPRPQTCAQLTTFLGMTGFSAEWLEDYAVKTAPLRDLLKSSEDKTLKKSLEWTTEALMAFDVLKQELQSAPALKMPDYDKTFHLYVSNRCNMYAAAVLTQDSCSGGRKQPIAYYSARLDDVARGWPPCYQGLAAVHMAYEKASAITKSYPVVIYTHHKITELINHSKLVLTTARCLQYLPLLTYPDVTIKRCETTNPANMLPFEFEGETHECVAETTRYTKLRPDLESEPLDDAQVIYFVDGSCFRDHMGTHAGYAVVQHKEGTFVTVKAEKCLQPCSAQLAELYGLTAACELAKNLSANIYTDSAYAHGVCHLFGAVWKLRGFQKSDGKPVRHGKQIMKLISAMMLPHRLAIIKCPAHQKDNSSTTMGNNAADEAAKCASGCKVA

SEQ ID NO: 533 - protein, 645 aa, synthetic construct
AALPELTDVDPRLWAEHKDDAGFIDVPPYVANLLKDTPVYCKQYPLSKEKEDGIRPVIKQLLAQGILIHTHSPYNTPINPIKKANGSWRLTQDLTKINELIKPLAPIVPDVHTILNSIPASHAYFTVIDICSAFFSVPVDPVTQPLFAFTFDHAQLTWTRLPQGFSDSPAVFSALVHATLMDAKLPPDTCLLQYADDILVTGASEDLCTAASTIVCNILAEAGFKASKDKIQWVKRKVEYLGHELSQGTVRLSADRIKAIATYKHPSTKKQMQSFLGLVNYCRSWVPNCSMYDKILRAATLQDSDEITWTAEMDQAFTYLKTSLIRPPALGLPVYSQEFHLYVHEDGGTAAAILAQEHGGNFRPVAYLSKTLDSVAKGLPACLRAVAAAAIMVQDAERIVLSHPLVVHTNHQVGVIMRNISTQHMTAQRRSGYEAILLATANLTLKPTSVVHSPTLCLHKLLTQGDFEDDDHDCLARIQISTACRPDVSTSVLEEGNHWYVDGSCFKPNDNEYLCGYSIVELPDRIIEAYSLPYKSAQVAELIALTRACQLAKGQCINIYTDSKYAHGIVHDFAKLWEERDFKTSEGKPISHHSVVAELIHAAQLPSKLSVIKVAGHVAGESEEAKGNRLADEVAKWAAKDVILS

SEQ ID NO: 534 - protein, 651 aa, synthetic construct
NTDHPALSHILAGLPDTLWSQGSADVGLVHCPPIYIPLKPGYQPIWKYQYPLNKEKIEGISGTIKGLLEAGVLRETESLWNTPILPTPKPGKRDYRLVHDLRPINQATATTTWSTPNPYTMLAALSPTHNWFSCVDISNAFFSCPLHPDSQDMFAFTYEGQQYTYTRLPQGFTESPALFNKILRDQLQSLPIPQDVVLLQFVDDICLAAESEASIIHATKILLERLFDLGYKLSKEKLQLGRRRVTFLGRVVAAGCTSITPSHRTDILSHPKPTTVKGMMAFLGLTGYSRQYIPDYAALTAPLRLLITTAGHANLKAPLVWTTDADQAFITVKQLLSAATVLAPPDYTQPFHLDVSEKEGFVNAALFQKGGGGERHVLMYYSSKLDNIEIGHPVCTKHVAAIAKALEKTSHLTMCHQTIVHTIHGVAAFLNSSAFSLSHRRTDRIKDLVLQSHITFTGEGVNMAENMSIGEAHNCVKDTETQMRVTPTLSSVPLSNPDLVLYCDGCCYRKNSGELIASLAVVSGKIGNNLTTVKAEIVPQPASAQKAEIAALTEACRYAEGKTVNIYTDSAYAHQAIHVDIPHWLRKGFVTSTGMLIKHLKEMTDLVEAVQLPTKVAILKCKGHQKSNTEIAKGNEAADHAAKTTAGYYDQ

SEQ ID NO: 535 - protein, 638 aa, synthetic construct
DNIKQLSVLPGLSEDPSAVGLLQVKEQQVPIATKAVHRRQYRTNRDSLLPIHKLIRQLESQGVISRTHSPFNSPIWPVRKASGEWRLTVDYRGLNEVTPPLSAAVPDMLELQYELESKAAKWYATIDIANAFFSIPLARECRPQFAFTWRGIQYTWNRLPQGWKHSPTICHGLIQTVLEQGSAPEHLQYIDDIVVWGDTAEDVFKKGEQIIQILLQAGFAIKRSKVKGPAQEIQFLGIKWQDGRRHIPADVIDKITAMSPPINKKETQSFLGVVGFWRMHVPNYSLIVSPLYQVTRKKNDFTWGPEQQQAFEQIKHEIARAVALGPVRTGQDVKNILYTAAGEKGPTWSLWQRTSGETRGRPLGFWSRAYRGSEECYTPTEKEILAAYEGVRAASEVVGTETQLLLAPRLPVLNWMFKGKIPSTHHATDATWSKWIALITQRARMGNFSRPGILEVIMDWPEGKKFETSPGEEVSRAKEAPPYNELPGNEKKYALFTDGSCRIVGKYRRWKAAVWSPVRQVAEATEGKGESSQFAEVKAVQLALDVAEREGWPVLYLYTDSWMVANALWGWLQQWEQNNWQRRGKPIWSAELWKDIAARIKNMVVKVRHVDAHMPKSRATEEQKNNHHVDQAAKIEVA

SEQ ID NO: 536 - protein, 614 aa, synthetic construct
RAVQAIIRGHAEIEPICLPQPRRITNTKQYRLPGGQQEITKTVQELERVGIIRPAHSPYNSPIWPVRKPDGTWRMTVDYRELNKVTPPIHAAVPNIASLMDTLSREIETYHCVLDLANAFFSIPIAKESQDQFAFTWEGRQWTFQVLPQGYVHSPTFCHNLVASDLANWNKPSTVKMFHYIDDLMLTSDSIEALEKTVPSLITYLQEKGWAINPQKVQGPGLSVKFLGVVWSGKTKVLPSAIIDKIQAFPVPTKPKQLQEFLGILGYWRSFIPHLAQLLKPLYRLTKKGQVWDWGRTEQEAFQQAKIAVKQAQALGIFDPTLPAELDVHVTQEGFGWGLWQRQGSVRIPIGFWSQIWHGAEERYSMVEKQLLATYSALQAVEPITQTAEVIVKTTLPIQGWVKDLTHIPKTGVAQSQTVARWVAYLSQRSRLSSSPLKEELQKILGPVTYHSETPEEIVVTCPEKSPVQEGKYPIPEDAWYTDGSSRGNPSRWRAVAYHPSTETIWFEEGDGQSSQWAELRAVWMVITQEPGNSALNICTDSWAVYRGLTLWIAQWATQDWTIHARPIWGKDMWVDIWNVVRHRTVRAYHVSGHQPLQSPGNDEADTLARVRWL

SEQ ID NO: 537 - protein, 654 aa, synthetic construct
PLRQEDEKKINPEVWYNPGSVGQLKIAPFTVKIKNPEIPVRIKQYPISPEGKRGLKPEIDRLLSRGLLEPCMSPYNTPILPVKKADGSYRLVHDLREINKRTIARFPVVANPYTLLSKLGPDNVWYSVIDLKDAFWACPLDESSRDYFAFEWEDPETGRRQQLRWTALPQGFTESPNLFGQALEQILKDYQTKSGVTLTQYVDDLLLAGKDEEDVRKESIRLLNFLGLKGLKVSKTKLQFVEEEVKYLGHYLKKGEKRIDPERIQAILSLPTPQNKRQIRQILGLTGYCRQWIENYSNKARFLYQKLTQEGLMKWTQRDTEKLQELKESLVHAPVLSLPDLKRPFFLFVNVAEGIAFGVLTQDWAGKKKPVAYLSKILDPVSRGWPTCLQILAGCAVLVEETRKITFNSSLKVLSPHNIRSVMQQKADKWISDARLLKYEGILLEAPDFALETTTLQNPAAFLYGEPEQEPLVHDCIATIEEQTKIRPDLEEEELDEGEKLFVDGSSKVIEGKRKSGYAIIGGTDLQVIESGALDKSWSAQACELYAILRALTLLKGKEGTIYTDSKYGFGVVHTFGKLWEERGLINSQGKDLVHQKLIIEVLRALRGPKKVAVVHLKGHQRGLDFRSRGNNAADQEAKRAAMREMVLREKQGN

SEQ ID NO: 538 - protein, 664 aa, synthetic construct
PLILYLSTPSTPTPDQLPFVNPQVWDTSEPVVASHHPPVKIKLKDGSKFPSRPQFPISLLHRLGLKPIIERLKRQGLLIPISSPCNSPILPVRKPSGAYRLVQDLRLINEAIVPLHPVVPNPYTLLSHIPPNTTHFTVLDLKDAFFTIPLHPDSYFLFAFTWEDPDTHTSGQLTWTVLPQGFRDSPHIFGQALAADLQQCLLKASTLLQYVDDLLLCSPALTISQDDTSSLLNFLGSKGYRVTPSKAQLCTPSVTYLGIHLTPTSKSLTGDRIRLLRELQPPQTADEILSFLGLAGFFRHWIPNFSILARPLYQAAKDTPQGPLSDPSSVRRLFSKLRDCLTAGPILTLPDPSKPFHLYTDERSGSATGLLAQPVGPTYRIIAYLSKQLDGTARGWQPCLRALAAAASLTKEALKLTLGQPLVVYSPHRLRDLLSHRSLAHLTPSRLQLFHLLFIENPQISLSTSPRLNPATLLPTPSPTSEPTHSCPQLLEDLTPPHPGLSDQPLSNPDRILFVDGSSFLAADGRRHAAYAVVTPETVVETVPLPIGTTSQKAELIALTRALHLSKGQRVTIYTDSKYAYLIAHTHSVLWQERGFLTTKGTPIVNGPLIAKLLEALSLPTEVAIVHCRGHQTSKDMVSIGNNKADSVARKTALSNPVSPILFL

SEQ ID NO: 539 - protein, 673 aa, synthetic construct
TCPISEEYLLLEKPEQKASPLIEKWKKTIPTVWAETNPPGLAIQQAPLVIQLTATATPIRVRQYPISQHAREGIAKHLNRLREAGILVPCHSPWNTPLLPVPKPGTLEYRPVQDLREVNKRVETIHPTVPNPYTLLSKLSPEHHLYSVLDLKDEFFALPIAKVSQPIFAFEWTDPGGTYNGQLTWTRLPQGFKNSPTLFNDALQRDLIPYRESHPDVTLLQYVDDLLLAADSFESCAKATEDLLRKLNALGYKVSAKKAQICLDSVTYLGYRLYEGKRSLGPERIQAILNIPKPTTKRQIREFLGSAGYCRLWIPGFAEMAKPLHTATRGEGAEMVWGEQEDRAFEQIKHALTQAPALALPDITKPFQLFAHEVRGIAKGVLTQTLGPWKRPVAYLSKRLDSIAAGWPGCLRAVAATAILVKEASKLTLGQDLQVIGPHAVASLLHSPPDRWISNARIIQYQVLLLDPPHITFLRTEALNPATLLPDDNSEAPLHNCLETVSNLTGLREDLRDQPLPKVDIELFTDGSSFIKNGIRYAGAAVVTQDQVIWAQALERNTSAQKAELIALAQALTWAKGKTVNIFTDSRYAFATAHVHGALYKERGLLTSEGKEIKNKREILALLKALWLPKKVAIVHCKSHQKTNSPQARGNAFADATAKATAEGEVLPIEILP

SEQ ID NO: 540 - protein, 673 aa, synthetic construct
TMPASEEYRLYEDTRQANDLGLLEIWKQEIPKFWAETNPPGLAKHVTPILVQLTSSATPARMRQYPMSREAQQGIRIHIQRLKKAGILVPCKSAWNTPLLPVRKPGTNDYRPVQDLREVNKRVETVHPTVPNPYTLLSLLPPERTWYSILDLKDAFFSIPLAPQSQPIFAFEWTDPEEGETGQLTWTRLPQGFKNSPTLFDEALSKDLSSFRGKHPGCSLLQYVDDLLIAASSQRDCEEATHDLLKVLGALGYRVSAKKAQLCAQEVTYLGYQIKEGQRALSQARIQTVLKIPTPSTKRQVREFLGAVGYCRLWIPGFTELAKPLYVATGGSDASLKWTEMEEKAFQALKTALVSAPALSLPDLNKPFQLFVAESVGVAKGVLTQTLGPWKKPVAYLSKRLDPVAAGWPGCLRTVAAAALLVKEATKLTFGQTLEIVTSHNLASLLYSPPDRWMTNARITHYQVLLLDPPRVTFKQTAALNPATLLPNPEDEATHDCGEILEALTSLRADLTDVPLPDALVTLYTDGSSFVKDGVRYVGAAVVTNQEVLWAASLPQGTSAQKAELIALTQALKWGAGKKINVYTDSRYAFATVHVHGALYQERGLLTAGGQAIKHAPEILALLAAIWEPEKVAVIHCKGQQRDDSDVAQGNRFADDIARKAAKRLVGTQAQLI

SEQ ID NO: 541 - protein, 672 aa, synthetic construct
TLTLEDEYRLHQQPQSPDKNIKDWVQRFPDAWAETGGIGLAKHRPALYIETKPGVNPVRVKQYPMTREARTGITPHIRRLLNQGILRPCRSAWNTPLLPIRKPNSNEYCPVQDLREVNKRVADIHPTVPNPYTLLSALPPYRQWYTVLDLKDAFFSLSLAPKSQELFAFEWTDIDMGINGQLTWTRLPQGFKNSPTLFDEALHEDLGEFRKNHPNLTLLQYVDDLLVAAENWDECIRGTENLLQTLGNLGYRASAKKAQICRPEVTYLGYLLKGGKRWLTQARKETVLRIPKPQSPRQVREFLGSAGFCRLWIPGFAELAKPLYEATKDKQPFNWTIEADKAFQQIKDALLSAPALGLPDVIKPFFLYIDESKGIAKGVLTQYLGPWRRPVAYLSKKLDPVAAGWPPCLRMIAATALMVKDADKLTMGQELHVITPHAIEGILRQPPDRWLSNARLTHYQSLLLNPPRIIFQAPSALNPATLLPDPDLDTPIHDCSEVLAQVHGLREDLQDHPLLDADAVQFTDGSSFLHQGQRYAGAAVVTETEVIWAEPLPIGTSAQKAELIAMTKALTMGEGKKLTVYTDSRYAFATAHIHGAIYRERGMLTAEGKSIKNKEEIVSLIDALWLPKKLAIVHCPGHQKPTDPVSRGNCLADKMAREIALQRDLIMVAQLP

SEQ ID NO: 542 - protein, 680 aa, synthetic construct
SLSLADEHRLFESQQEPGGDMTHWVKRFPTAWAETAGTGLAKHLPPVVIQLKASALPIRVKQYPMPEEARRGIAPHIHRLIKEGVLRPCQSAWNTPLLPVRKPGSGDYRSVQDLRKVNERTEDIHPTVPNPYTLLSHLPPSQVWYTTLDLKDAFFSIPLSEISQPLFAFEWQEDGGQSGQLTWTRLPQGFKNSPTLFNEALSQDLEPFRRSHPRVTLLQYVDDLLLAAETREECIKATEHLLTELGELGYRASAKKTHICKRSVTYLGYRIADGARWLTDAMKQTILAIPSPTSTRGVREFLGSAGFCRLWIPGFAEIARPLYEATKEAPDWSWGEREQQAFDQLKDALLQAPALALPDPTRPFTLFVDEKKGVAKGVLTQQLGPWKRPVAYFSKKLDAVAAGWPPCLRIIAAIAVLVREADKLTFGQALWVTAPHPVEGILKQPPGKWMTNARLTHYQGLLLDSPRITFTDPVILNPATLLPNPELQTPVHNCKEFLSEVTQVRADLKDTPLSGCKLNWYTDGSSFFQDGARRAGAAVVDQEGNTVWSSALPPGTSAQKAELIALAEALERAKGKRVNIYTDSRYAFGTIHVHGAIYRERGFRTAEGKHLKNLAEVQRLLMAVEKPKAVAVMYVPGHQSAKTPEAVGNNRADQEAKRVAMVSPPMETGQPSTVAAIDVP

SEQ ID NO: 543 - protein, 623 aa, synthetic construct
QRCISIRAIQTILRGHAKHEPICLPKPRRITNVKQYRLPGGQDEITKTVQELERVGIIRPAHSPYNSPIWPVRKPDGTWRMTVDYRELNKVTPPVHAAVPNIASLMDTLSREIKTYHCVLDLANAFFSIPISEESQDQFAFTWEGRQWTFQVLPQGYVHSPTFCHNLVARDLAKWEKPNNVNLYHYIDDLLLTSDSLEAVRQAADLLIAYLQKRGWAINPQKVQGPGLSVKFLGVIWSGKTKVLPSAVVDKVQAFPVPTTSKQLQECLGILGYWRSFIPHLAQLLRPLYKLTKKGQSWNWGKIEQDAFQQAKLAVKQAQALGIFDPTLPAELDVHVTQDGFGWGLWQRQSSVRTPIGFWSQVWHGAEERYSMIEKQLLAAYSALQAVEPITQTAEVIVKTSLPIQGWVRDLTHLPKTGVAQAQTVARWVAYLSQRSSLSSSPLKEELQKILGPVTYHSDTSKEPMVAPPEKSPVQEGRYPIPEDAWYTDGSSRGNPSKWRAIAYHPSTETIWFDEGDGQSSQWAELRAVWMVITKEPGDGVLNICTDSWAVYRGLTLWITQWATQEWTIHARPIWGKDMWVDIWNTVKHRTVCVYHVSGHQPLQSPGNDEADTLARIRWIENS

SEQ ID NO: 544 - protein, 575 aa, synthetic construct
NSKPLEVPTALPLKWLTEKPIWIKQWPLAEDKLQALEQLVQEQRDANHIEESTSPWNSPVFVVKKKSGKWRMVTDLRAVNKVIQPMGPLQSGLPLPSLLPKRWPLIIMDLKECFFTIPLQEKDREKFAFTVPTYNNSQPSRSYQWTVLPQGMLNSPILCQYFVNKSLEIIRKQFPKSIIYHYMDDILLSDSNKDTLESMFEEVKKVLPRWGLQIAPEKIQREDSINYLGYRIGLEKIRTQKAQIRRDRLRTLNDFQRLLGDISSLRPAVGITPDLIVHLNKTLDGDKDLNSPRKLTVEAEKELTMIEEKLQEAHVDRVNPNLSSILVILPSRISPTGILMQREDIILEWIFIPHKPSKKLKTYVEKVSELIIKGKLRLRQLAGIDPAEIIVPFTTEEIRKLWEDNEPWQRACANFLGEISSNYPKSDRLNLIKRTSWILPRIVRDAPITGARTFYTDANKSGKAGYKSEELSKVEQSPYNSVQKAELYAILMVLRDFKEPLNIVTDSQYAERVILHIETAEFIPDDTELTSLFIEVQDIIRNRLCPMYITHIRSHTGLPGPLAQGNAEIDQLLIG

SEQ ID NO: 545 - protein, 618 aa, synthetic construct
NKARLKEILEKGQYSQFKNDVGTIKGIKPYEIPGINPGKEKQYPLGPGEEQIKIIVKELEEIGVIEQTKDPVCLTPIQGVLKPGTTDKYRLVHNLKALNKRTTTDQRTLIHARKTLINLPNHKFKTTIDLSNGFWSIPLSEDSKYLTGFQIQGKTYQWTRLPQGFANSPNVFQSVMEEILDDLDVTVYIDDIYFSDETEEAHLTKLEAVLTRLRERGLKIGLKKCTFGAFDVQYLGFEITEKGRQIKAGFCEDLTIPDTALQAEKLLGELEFVSGQVPGYAERAQPCHGVKKGLRQMIGRKTRTFDRPLTSEEQEAFRILIDHVTQSALVLEPRVPKTDIYVKIDLGEQGYTAYCYNESGKTPCAVRSYAYKGAEKSYTEVEKVLLSCFNSLAFLKSTCEPDNIIFITPLHDGIREIRKDTVEVKKAQVSRYSKWLLMQTDPKIHFQGNNKPLKVKTGNDTRATPKRTIEATYYTDGSKTDTDLRAHWGWVAHTPEGRKYHMKGETLGSAQTAELTAVVEALIDARSRKWKTIDVVTDSHYVYLGVTEDLAIWERENMHKQNGDKLAHSTLWQLVSRYRAELDLVVRHVRSHTLNTDPDSKGNSEVDELVQMRKMYIP

SEQ ID NO: 546 - protein, 610 aa, synthetic construct
NKKRLQAILEEGSYSQFRNDCGNMLTPPVNIPGASPAPQKQYPLGKAEEGLAETIDELAQLGIIKETEDKRVTISPIQGVQKPDMSWRLVHNLRELNKRTVPDQSYLINPKKAINSLPNLKFKTALDLSNGFWSVPLDEESQLKTGFQFRRKTYVWTRLPQGYTNSPNIFQDKITDLLSGLPVTVYIDDIYWSHDEEEEHLNVLEEVITRLRNAGLKIGLKKCTVAREQAEYLGFKVTDEGRQIPDDYLKGIVLPTTALEAETVLGKLEYVSQHVPEYGIRSKKCHEVKKGLREGVGRKVKTNNRLLTLEEQNDLAALIEYVGRERKTLTSRIPKTDLRVKVTTTPEGYSLAYFNEGGKEPIMYKSKAWTLPEARYGLIEQNLCACFASLAVSRAIMEPDQIIFETDAPALKEMKKDTLESSKAQISRWGKWQAMQLDPKISFVNKGGKVPKTPKPKERGMPSCTLYTDGSKRQGEDKAQWGLYITGPEKPVRKSGQIYGSARDAEVCAVLEGLIWVRDRKYKVIDIVTDSDYVYRALREDLPIWEKNQMMKQNGRPLQQQNMWILISQKRDGLDIEVRHVNSHTDGSTADHIGNREADMIAQSRAVICP

SEQ ID NO: 547 - protein, 622 aa, synthetic construct
IERIVKESELSEKGELEKLLRKHMDSYAKSKNDCGKVQTKYEHVIQGGIPPPQRQYKINSAAEKEIGETIKELTEQGILRKLPKEELAACNSPLQAVRKPDGSWRLVTNYKALNKVTIPDTRYLINCGEVSGNIGREKNWLSKIDLANGFWSIPLAKESQLRTAFTFGTDHYVWKRLPQGYRNSPNVFQALILEILAGIPVTVYIDDILISTKDEEEHLKILEQTLDRLTEAGLKPSLKKMEIGKHEIDFLGFKLGKDTKALTTSTRVKLEEMQQAGPPKNRKQLQSLLGTLNYIRELIPKYSREAKILYQGTKEGKWQWTDQMEQARLKLISMALESGALERRDETLPLYVQVSEEEEEVTLTLWNAEGICPIAFLTHQQEPTMKRFDENSAERILAAVCKRLLQLKAVAKEQPIVIFSMAGELARLKRNLVMNQARINSHRWDQWSLILGDNQLDWRRIKQKRKDKITRYHENHKHLPKYFTDGSERGGKVKWGYLVKFNGQLITSQKEEIQGTAQLAEVMAVERALQRAVELGHTEIVLTCDSEYVTDGINLELDKWKANDFHTAKGKPMAHRDQWKNIANLLEKVKAHVYHQVSHTQQTNESAEGNRQVDKLIGRVKT

SEQ ID NO: 548 - protein, 628 aa, synthetic construct
IRSLRIEPVLVGKLHMTPIEVPKPTKVISCKQYRIPGGHKEIAETIQDYLRAGVLVTTTTQWNNPIWPVKKSDGSWRMTVDYRELNKVTPPLMAAVPDTVTLIERIQTFQGTWYAVSDLANAFFTIPIAPQFWDQFAFMWQGRQYTFTRLPQGYKHSPTICHRIVAEHLDDIVIPEKIQITHYIDDILVQGFSEAEVQKVLEILIEKLKIKGWEINPSKIQGPSQSVKFLGIYWNQGHRQIAPEAKRAILDFAAPKSKKEAQKFIGLFGYWRAHIPHLGQILQPLYKVTKKKYEFEWGKEQSTAFEEAKIAIQTALDLWPMREGPVELQVTIEDMYASWSLWQKQEGKRVPLGFWSRKLPSAGVTYTPFERQLLAAYWALVETEQLTLGHDILLRPGIPIMQWVLSDPVSHKIGHAQESSIIKWKWYIQNRAKAGPTGIMRLHELVFQSPVDPIDSFSVEQLPKENSPVIWNTGYDDLTQEQKQHAWFTDGAAKYIGQDRYWKAISFNPTTGMILETTGKGKSSQFAELQAVYQAIMYEKGKQCHIFTDSWAVANGLATWLPMWRHNNWRIHDKLLWGNELWKEIWESLSCTNVSVFHVDAHAQVNSKEREYNAKADSLATIAAASLP

SEQ ID NO: 549 - protein, 646 aa, synthetic construct
SLPLVEQNVNPRVWADGKSVGRAQNAIPVVVKLKDPHVFPHKKQYPLKPEVKEGLKPIIENLKEQGLLIPCNSPCNTPILGIKKSNGKWRLVQDLRIINEAVVPLHPVVPNPYTLLSEIPERAKYFSVIDLKDAFYSVPLAEESQFLFAFEDPTQPASQLTWTVLPQGFRDSPHLFGQSLSRDLQNFNSSEAVVLQYVDDILLCAETEEACLRASEDFLNFLAGCGYKASREKAQLCQQSVRYLGLIISEGTRAIGPERIKPILNHPLPMTLRQLRGFWGITGYCRIWILGYGELAWPLYKLIAETQQAQTDKLVWSPETQKAFKVLQTALLQAPALSLPTGSEFNLFVTERKGVALGVLTQPRGPHQQPIAYLSRELDVVSRGWPHCLRVIGAAALLAPEALKIINGRNLTVLTSHDVSGILNSKVNIWMTDSRLLKYQSLLLEGPVTKLKVCGNLNPATFLPEKENETPDHDCSQFLTLNYAAREDLKDTPLDNPDMEIFTDASFFVCEGKCKAGYAVVMAEQVLEAKSLPQETSAQLAELVALTRALELSKGQRVNIYTDSKYAYLTLHAHAAIWKERHFKTATGEPIKHFREIERLLTPIYCPKEVAVMHCKGHSRDGSKIAEGNHLADCQARKAALYETPS

SEQ ID NO: 550 - protein, 621 aa, synthetic construct
ITKFITNLAAVEIPPVILPAPTQASFTPQYPLKGGHQDITKAIQKLLDEDIIELGRSHIYNSPVWPVKKPNGTYRITIDYRNINKVSPVVEGILPNASEVINIIQGDAPRYMAAIDLSDMFFAIPIDKQSRQITTFAWQGKQFQFKRLPQGYKNSPTIAHNILATYIDPKQYKSKIIQYIDDILLYNNDIDTLQEDLDKLIRHLRQHGWTINPEKIQKPDTKVTFLGIHWDSEGRSVPNKVINKPDSLKSPTSKREAQQLMGLFMFWKQHIPYMADIAKPIYKVTRKAVDFEWNEEQEEAFQQLKHYIHLFSQLQNIQSGDKIVLDIAFISEHGNWGLYKKGQEDSRLMPVGFWSKKFPYSYFKYSFFEKLIWTLYAALLHTEPLTGQQPITVRSTLPLKAWLSFEAEDLAGSQIDEKVLAWKWYINTRSTSGAGGLALLTEEVNKLEVEPPTCANKFVPIEPIGVQGPKYSPVLKNAWFTDGSASVSGDRTIWKAAAFCPATQRALTATGESNSAQHAELIATYIAVKEAVDTQKHKIYIFTDSWAVCNGIILWSGKWKQTNWQINGKDLWSKEYWKKLDDLSSQIKIYATLVNAHATDSSKTTLYNKITDQLAKGLTPE

SEQ ID NO: 551 - protein, 648 aa, synthetic construct
EIDTRIMDQVYPGVWAIDVPGRAKNASPVIVKLKEGQGAIRIKQYPLKREDREGIRPNIERFIELKLLKECESEFNTPILPVKKPDGSYRIVQDLRAINKITEDLCPVVANPYYTLLTTLTPDLAWFTVLDLKDAFFCLPLHEASQRIFAFEWENPRSGRKTQLTWTVLPQGFKNSPTIFGNQLAKDLELWEPPSGEGKVLQYVDDLLIATRTEESCIIWTVSLLNFLGLQGYRVSKKKAQVVLQQVTYLGYEISAGQRVLGKARKEAICQAPRPRTVKELQTFLGMTGWCRLWICNYGLLVKPLYSLIAANQKDLQWDAESDRAFHELKKALMSAPALGLPDVSKPFFLFSHEKQGMALGILAQDLGPYRRAVAYFSKQLDATAKGWPGCLRAVAAVILNIQEARKFTLGQKMTVLVSHTGSAVLETKGGHWLSPQRFLKYQAIMVEQDDVEIVTTNIVNPASFLNGNVGESVDHDCLETIEATYSSRTDLKDVPINGAEHWFTDGSSYMLNGKRHSGYAVTTSEEVIESGPLPADTSAQKAEIITLTRALERAQGKPINIWTDSKYAFGVVHAHGAIWKERGLLNSQGKIIKHAEEILKLLNAVQLPERVAIMHIKAHQKVSTELERGNELADREAKQAARKAIKV

SEQ ID NO: 552 - protein, 571 aa, synthetic construct
MSIAPSFALPLKWLTKQPIWVEQWPLTKEKLSALEKIIQQLLKEDRIETSVSPWNSPIFVIKKKSGKWRLITDLRKINTVIQPMGALQPGLPQPSMIPKNWFLTIIDLKDCFFTIPLQPQDREKFAFTIPSLNNNKPTSRYQWKVLPQGMLNSPTLCQFYVNQPLERLRSLFPSALVIHYMDDVLFAHYDKIKLKQLVTKAESVLGEYGLIIAKEKIQEQPPFEYLGNKLDQTRIWPQKVELRRDCLHTLNDFQKLLGDINWLRPSLGIPTYALKNLFLTLQGDPALDSPRSLSTLAEKELLQIEQIMQTAYLDRIDPNEPVVLVVFPSQHSPTGIFWQKDLILEWLFLPNKEQERLSTYLDKICKIIAKGRLRLRHLIGTDPQQIIVPLTQQEILCQYKLSNEWQLALQDFLGDIHNNFPKNKRLQFLKKTQWILPSIVKTKPIPKADTFFTDANKLGMAGYTGPKTRVEQTPFRSVQKAELAAIIMLLQDYSDPLNLVTDSQYAEHTVKEIETATLIADGSEIVQLFSILQLLIRNRSQPIFITHIRAHTALPGPMSAGNEQIDRLLIG

SEQ ID NO: 553 - protein, 647 aa, synthetic construct
SHPRISHPVNPSVWDTDNPSIAQCPPVSIQLRDPTKFIHQPQYPLTTSTLLGLSPIISDLLHKGYLRPTQSPYNTPILGIKKPNGSYRLVQDLRSINAAVIPIHPLVPNPYTLLSLIPASSTHFSVLDLKDAFFSVPLDPSSQDLFAFTWTDPHTRHSEQLTWTVLPQGFRDSPHLFGQTLSHDLKNFYPTCPLSTLLQYVDDLLLCNPSWDISQRDTAALLNFLAQHGYKVTPSKAQISASQVTYLGFLLTPQHKSITTDRKQALSSWPVPKTKAEILSFLGLAGYFRAWIPNFSLLAKPLYNLSKGDPNEPLPSSPKTPFNNLRLKLLSAPALHLPDLTRSFLLYVHENQGQALGVLGQMQGPTFAPVAYLSKQLDPTVRGWAPCLRVLAAAQKLQQETFKLTFGAPLTICSPHHLKDLLAYKSLHTLPPSRVLALITSFLENPSISFQSCSPLNPATLLPVHPTPEPPLHNCLETLQSLTHSPSTIVEGPLPHADHNWFTDGSSYRSPTAPKAGYAIVSLTATIEAQPLPLGTTNQQAELIAATRACILAEGKTLNLYTDSKYVFHTLLSHSAIWKERGFMTTRGNTITNSDLIHKLLQASQLPTRLGIIHRKAHKKDNSPSTQGNRLADAAAKNAAFSKSSET

SEQ ID NO: 554 - protein, 613 aa, synthetic construct
GSPTASIRLLQQAPALPPSKTVNVKPYALPLGAREGITPVIAELREQGIIVPTHSPYNSPVWPVRKPNGKWRLTIDYRRLNANTGPLTAAVPNIAELIATIQEQAHQILATIDVKDMFFMVPIQEADRDRFAFTWEGVQFTFTRLPQGYCHSPTIAHYALAQELAQIPPREGVRIYQYIDDVLIGGSDAAAVGQTQTEIITHLENLGLQIPAEKVQLPSSEVKFLGIWWRGGTVCIPPETLTTLEEVKSPENKKELQHALGLLVFWRKHIPDFSIIARPLYDLTRKRATWDWTPVHEEALKLLIFEAGVYQALGPIHPTDPFQIEWGFAIHGLSIHMWQRGPEGTTRPIGFHSRSFKDAEKRYSIWEKGLFVVTLALQEAEKIIRQQLIILRGPFKVLKPVLAGTPPPVGVAQRDTVRKWYAQLDHYCHTYQIEEGAPKVLKIQDPPSDHPEPPPSYIKPAPPFETHLKNVWFTDASSRREGKVWKYRAVALHVDSGDRIITEGEGSAQVGELTAVWSVIVKEAETTEPVFIYTDSYAVFKGCTEWLTFWEQNHWEVNRVPVWQREKWEEILNIAKRKSFLVGWVAAHQSGNHPAHLLNNQVDSMTRLMRTAT

SEQ ID NO: 555 - protein, 426 aa, synthetic construct
MDTSSLMEQILSKENLNAAYLQVVRNKGAAGVDGMNVEELGAYLSENGENIREQLRTRKYKPQPVRRVEIPKPDGGVRNLGVPTVVDRFVQQAVAQVLTPIFEEQFHDHSYGFRPNRCAQQAVLKALEMMNDGHSWIVDIDLAKFFDTVDHDKLMTIFGRTIKDGDVISVVRKFLVSGVMIDDEYEDTIVGTPQGGNISPLLANIMLNELDNELEARGLNFVRYADDLIIMVGSKQAADRVMKSVTRFIEEKLGLKVNAEKSKVDKPKGIKYLGFGFYFDTFAKAYKARPHPKAVTKFKAQMKKLTCRSWGVSNAYKVQKLNQLIRGWINYFKIGNMKRLCQRLDSNIRYRLRMCIWKHWKTPKNRAKNMMKLGLPAWAAWRSAYIHGYARVCRSRDVHRTITSERLKQFGLMSMTDYYTERSVAC

SEQ ID NO: 556 - protein, 427 aa, synthetic construct
MDTSSLMEQILSKDNLNAAYLQVVRNKGAAGVDGMTVEELGAYLSENGESIREQLRTRKYRPQPVRRAEISKPDGGVRKLGVPTVVDRFVQQAVAQVLTPIFEEQFHDHSYGFRPNRCAQQAVLKALEMMNDGHSWIVDIDLAKFFDTVDHDKLMTIFGRTIKDGDVISVVRKFLVSGVMIDDEYEDTIVGTPQGGNISPLLANIMLNELDKELEARGLDFVRYADDLIIMVGSRQAADRVMKSVTRFIEERLGLKVNAEKSKVDKPKGIKYLGFGFYFDSFAKAYKARPHPKAVAKFKAQMKKLTCRSWGVSNSYKVLKLNQLIRGWINYFRIGSMIELCKRLDENIRFRLRMCIWKHWKTPKNRAKLLMLLDVPRWAAYKIAYSGNRYARITHNGWVHKAISNKRLAAFGLISMEDYYAKRRVAC

SEQ ID NO: 557 - protein, 427 aa, synthetic construct
MDTSSLMEQILSKDNLNAAYLQVVRNKGAAGVDGMTVEELGTYLSENGESIREQLRTRKYKPQPVRRVEIPKPDGGIRNLGVPTVVDRFVQQAVAQVLTPIFEEQFHDHSYGFRPNRCAQQAVLKALEMMNDGHDWIVDIDLAKFFDTVDHDKLMTIFGRTIKDGDVISVVRKFLVSGVMIDDEYEDTIVGTPQGGNISPPLANIMLNELDKELEARGLDFVRYADDLIIMVGSRQAADRVMKSVTRFIEERLGLKVNAEKSKVDKPKGIKYLGFGFYFDSFAKAYKARPHQKAVAKFMAQMKKLTCRSWGVSNAYKVQKLNQLIRGWINYFKIGSMKGLCERLDCNIRYRLRMCIWKHWKTPQNRAKYLMQLGIGRKYAWSTAYTGARIAYVCQRGAMNMAITKERLTRFGLVSMADYYAKRRVTC

SEQ ID NO: 558 - protein, 426 aa, synthetic construct
MDTSSLMEQILSKENLNEAYLQVVRNKGAAGVDGMSVEELGPYLSENGENIREQMRTRKYKPQPVRRVEIPKPDGGVRNLGVPTVVDRFVQQAVAQVLSPIFEEQFHDHSYGFRPNRCAQQAVLKALEMMNDGHNWIVDIDLAKFFDTVDHDKLMTIFGRTIKDGDVISLVRKFLVSGVMIDDEYEDTIVGTPQGGNISPLLANIMLNELDKELEARGLDFVRYADDLIIMVGSRQAAERVMKSVTRFIENKLGLKVNAEKSRVDKPKGIKYLGFGFYFDSFAKGYKARPHMKAVEKFKEQMKKLTCRSWGVSNTYKVKKLNQLIRGWINYFKIGSMKNLCRKLDAHIRFRLRMCIWKQWKTPKNREKNLIKLGLPRYAAHGISYAKGYARVCRSWNLHISISKERLAKFGLISMEDYYAERRVTC

SEQ ID NO: 559 - protein, 429 aa, synthetic construct
MDTSSLMEQILSNENLNAAYLQVVRNKGAAGVDGMEYTELQKHLSENGEIIKEQLRTRKYKPQPVRRVEIPKADGGIRKLGVPTVTDRFIQQAIAQVLTPIYEEQFHNHSYGFRPNRCAQQAVMKALEMMNDGHSWIVDIDLERFFDTVDHDKLMTIIGRTIKDGDVISIIRKFLVSGIMVDGEYEDSVIGTPQGGNLSPLLANIMLNELDKEMEARGLDFVRYADDCIIMVGSRQAAERVIRSITRYIEEKLGLKVNASKSKIDKPKGIKYLGFGFYYDSFAKEYRAKPHAKAVEKFKARMKELTCRSWGVDNGYKVKKLNELIRGWINYFKIGSMKGLCEKLDANIRYRLRMCIWKHWKTPQNRAKNLIKLGISRRYAWSTAYSGARIAYVCQRGAMNIAVTKERLTRFGLVSMLDYYVERRSLMLS

SEQ ID NO: 560 - protein, 434 aa, synthetic construct
MELIDWILADQNIDAAIWAVKHNRGAAGIDSMQVDELDEYFKNHREEIKQLIREKKYVPQPVRRVYIPKPDGKQRPLGIPTVVDRVIQEAIAIVLMKGYDRYFSEYSYGFRPNRNCHQAVTKALEYMNSGYEWVVDLDIEKYFDTVNHDKLVSILRERINDDTTLHLIRAFLKAGVMENGLVSPTEQGVPQGGPLSPVLSNVYLDKLDRELENRGLHFCRYADDCTIYVGSEMAANRVMRSIADWLGRKLKLRVNMTKSKVVRPSGSQFLGFRFWKSPREGWKPKPAKERCKRLKDKVRAILCRRKAVAVPLGVTITKLNQLMRGWINYFCLGSMKGFMKEFGEWMRHKVRVVILKQWKKADTIYRNLRKTNRICRCGISDEEIYKVAYSGRGWYKRATHNAVNFILSPQVLSQRTKQRPGLVDPLKYYLARCT

SEQ ID NO: 561 - protein, 463 aa, synthetic construct
MGTENRESCSQRDSAERKGYVRAHRSFNRIWKERDSAEPDILGKILEKDNLNRAYKRVKANKGAPGVDGMTIEATLPWLKEHNHELVERIRKGKYTPSPVRRVEIPKPDGGIRKLGIPTIIDRIIQQAMLQPLLPIYEPLFSDDSFGYRPGRGAKDAIFRIKEYIEQGYTRAVVLDLSKYFDTLNHTILLNLLRRQVKDERVIQMVKRYLKSGVMENGVVAETEEGSPQGGNLSPLLANVYLNEFDWEFHRRGVPCIRYADDIVLLAKSERAAERLLESSAKYLEETLKLKVNREKSRTVSVFAIRNFKFLGFCFGKNGKGIYIRIHGKSWKKAKDKLRQLTSRSRCGSIVRTMEKIKVYMRGWLNYYGIADMKNNMESLNGWLYRRIRMCIWKQWKLPKTRKRKLAGLGVDSHYAATIAYDRKGYWFNAGNKAVNWALSKERLTNWGLYDLATAYQSVHVNY

SEQ ID NO: 562 - protein, 426 aa, synthetic construct
MKLIETILFSENVIKAQSRVLSNKGGAGIDGMHVDELAEYMRANWDGIKESILVRKYNPAPVRRVEIPKVNGGVRKLGIPTVLDRTIQQAIVQVLSPIFENEFQENSYGFRPCRSCEQAILKLLEYLNEGYEWIVDIDLEKFFDNVPQDKLMSYVGRVIRDPDTESLIRKYLKSGVMENGIYEATEEGTPQGGNLSPLLSNIMLNELDKELVNRGLHYVRYADDCVIAVGSEASAKRVMRSVTTWIERELGLKVNASKSHICRPTKLKYLGFGFYRNPQNRQWQSRPHESSVSKFVRSLKRLCKRSWSVSMTDRITRLNYVTRGWINYFSISFMKLKLEKIDEHLRTMLRKVIWKQWKTPQKRAWGLRKLGVDSALARRTSFCGDRYEWVVRRTCVARAISKDVFTRRGLVSCLDYYLIRHSLKTS

SEQ ID NO: 563 - protein, 466 aa, synthetic construct
MESYLTQDRAEPEAGCGANSVSDTEGDGRTVQHDLVEEVVSWSNLEAALKQVVSNRGAPGVDGMTVDELGPWLETNYSELAEKVRNGRYRPNPVRRKEIPKPNGGVRDLGIPTVVDRLLQQAVSQVLMPIYEPSFSDTSYGFRPGRSAHDAIQKAKEYLSEGFGYVVDLDLARFFDTLNQDYLMNILRERVRDKALLELIKRFLRSGVVLPNGLLRETREGSPQGGPLSPLLSNIYLDRFDKLLESRGLRFVRYADDCLVFVRTPRAGERVRESVTRYLEGTLRLRVNQEKTVVGRADQVKFLGFRLYRQKTVGATVHDSSLARFRKEVRRITKRNRGTSLGSVLTELKTFTRGWVGYFRIGLSKSRAEKLDGWIRQRVRQYIFKQWKTLRNRASQLVSLCPDYLRPRPGFTPYSWVRECRRAAFSRSYWKAVNYPVVKRALSNSYLAGLGLYSLSEQLEKWNKGV

SEQ ID NO: 564 - protein, 468 aa, synthetic construct
MKDGMQKTSALANDYPQRNRTESERYGGVQTFMWMTEDNIVEVPFDKEHLLEVILSPDNLNKAYKAVVRNKGCGGIDKMSCEQLLPWLKANKDELIRSLLDGTYRPNPVRRVEIPKDNGKMRLLGIPTVVDRMVQQAINQVLTVIYEPQFSKRSFGFRPRRGCPTALREVQKIVNEGYKYVVDLDLERFFDTVSHSKLIEILSRTLKDGRVVSLIHRYLRSGVIDKGLWHASEEGTPQGGPLSPLLSNIMLNELDKELARRGHPFVRYADDSMIFCKTKRAAERVRESITKFIEGKLFLKVNKEKTAVSYIKGVRYLGYSFYIHKGKCQLTVHPKSKARMKSRLKELTSRSNGWGYEKRKQKLKEYIQGWVGYYHLADMKRLCMETDKWLRRRIRMCIWKAWKKPRTKVANLIKCGIAEWQAYQWGNTRLAYWRIAHSPILLTAISNDRLRKQGYMCLMDLYLEWNPK

SEQ ID NO: 565 - protein, 456 aa, synthetic construct
MSLGRAVHQKPGDTGRSAGRRGEAEPKAMRDEARTARHETASPGREDLLGQALASANLEAAWKRVKSNRGSAGVDGLSIRDTAEHLKMHWPRIRASLLDGSYRSQPVRRVQIRKPDGGMRELGIPTVTDRLIQQALLQVLQPRLDPTFSEHSHGFRPGRRAHDAVLEAQRYVQSGYRVVVDVDLEKFFDRVNHDILMARLARRIDDKAVLRLIRRYLVAGIMDGGVVMERYEGTPQGGPLSPLLANVLLDEVDRELERRGHRFVRYADDCNVYVRSRRAGERVLAGLRRLYERLHLKVNEAKTAVAPSSRRKFLGYAFWYGPGGQAKCRVADKAKETFKQRIREMTRRSGGRSLPDIVERLQTYLPGWKAYFQLAQTPKVFHELDEWIRHRLRAVQLKHWRRGKTMYRELKTMGASETDARQVAANSRRWWRNSRFLLNRAMPIAYFDRLGVPRLS

SEQ ID NO: 566 - protein, 471 aa, synthetic construct
MQVDKVFLMTDNLSSTQCRNETLLGADGIRARVAGPRPKGVSVKATPSWTKADPGWCNIEKVVNSIIIDEALSKVISNRGSGGVDHITTAELRDYWSKYGGTIRQKIVQGTYIPLPVKRVDIPKPNGDKRMLGIPSVIDRVIQQALVNVLEPVFDPQFSEFSYGFRKGRNAQQAVLQAQSYIKDGHRWVVELDLSKFFDRVNHDILMSRVARVVEDKRILKLIRRYLNAGIMEDGIVKPRSEGVPQGGPLSPLMSNIILTELDRELEKRGHKFCRYADDCNIYVKSEEAAKRVLESVTKYLEGGLKLRVNRDKSGTFRPYESVFLGYSFHRRNWTRIVVAEESIKRLKTKLKIIYRHSRGTSLGTAIKKLNQILRGWRTYFKLDTRKGFFEKLDINIRTHLRVLIWRAWKRPRTRERELRKRGLDAFNAWKSANNGRGPWYNARAPHMRIAIPNALFVRLGLYNLSSMGTV

SEQ ID NO: 567 - protein, 429 aa, synthetic construct
MVSLEKILEPSNLTEALKQVVSNKGAPGVDGMAVDELEPFIRNHPGVLSQAIRDGSYRPSPVKRVYIPKDNGEKRPLGIPTVVDRLVQQAIAQKLSEEYEPNFSDNSFGFRPKRCAHDALKRIVDNANDGYEYVIDLDLAKFFDTVNHSKMIQVLSETVKDGRVVSLVHRFFRAKINDEGKIIKPAIGMPQGGPLSPVCANILLNELDQLLDGRGHRYVRYADDMLLQFRSLRAAERVFTSVKRFIEEKLFLKVNVEKTKICHLSKDVKFLGYSFYKSYDKDDLDGKGKWKLVVHGKKRRSFEQTIKTLLDRKCPKGLERCKEDLKLYLCGWTNYFYMGLSRSRRQSYDKWIRRRIRQLYWKIWKKPSTRIRALMQLGIERSKANEWGNSSKAYWRVAGSWILKRSLTNDVLQNLGWIWLGIARKWSPQ

SEQ ID NO: 568 - protein, 471 aa, synthetic construct
METRHGMKYRQLHIEDYLGEIPAEQGRGTGVYAHEWITGNPDTNTDFWTDNLLDAILRSDNLNAAYKRVKSNRGTGGIDRMQVDELLPYLRNHRDELIRQLREGKYKPNPVRRVEIPKEGKDKVRKLGIPTVVDRMIQQAIAQELTAVYEEQFSENSYGFRPGRSAHDALEKCREYVNEGYIYAISMDLQAYFDTVNHSKLIEVLSRTIKDGRVISLIHKYLKAGVMEDGGFHATSEGVPQGGPLSPLCGNVMLNELDKELERRGHKFVRYADDCIVLCKSRKSAERTLKHIIPYITKKLYLKVNLEKTTVSLVSKVKYLGYGFYRNKGKCRMRVHPKSIRKMKNHLRELTVRGNKWSNPEREEKLRRYTTGWINYYRLADMKSLMETTDEWLRHRIRAVYWKQWKKVRTRYKILRTLHLPEWKVHELANCRKGTWRAASTLNSVLTKTVIVDRLGYPSMTAHYLKVRVNY

SEQ ID NO: 569 - protein, 435 aa, synthetic construct
MCEIRKVETDMELLEEVLSKDNLNKAYKQVYKNKGASGVDGVTVDELFSYIQEHKEEILWKIRNRKYKPQPVRRVLIPKDNGKMRKLGIPSVIDRVIQQAIVQVLTPIYEEQFSNHSYGFRPKRSCEMAVVQALEYFNDGYDWIVDIDLQSFFDEVNQDKLIGIIRRTIKDGDLVSLIRKFLQSGVMENGVLQPTKKGTPQGGNLSPLLSNIMLNELDKELEARRLHFVRYADDCLILVKSEKAANRVMESITKFITKKLGLKVNVEKSKIARPDDIKYLGFGFYKKINQNEWRPKPHIKSVQKFKTKLRDILVRSRSISLDDRLLRLKQLIYGWVNYFRIADMTILLRDIDGNIRRKLRVIIWKQWKKIKKRYACLRKLEITHRDAYVTANSRSGYYHISHTRVLEKAISKERLNKRGLVNSLDYYLKVHIITN

SEQ ID NO: 570 - protein, 463 aa, synthetic construct
MSKAMRQMPGQPGRVCVAHGEAVRDLISDEAGGPPREHPDTGSATPPTGPGGLLAAMLTRQNLQLAWKRVKANKGAAGVDGLDIEQTAQTLRTRWPDIRQSLLQGRYRPSPVRKVMIPKPDGTQRELGIPTVTDRLIQQALLQVLQPLIDPTFSEHSYGFRPGRRAHDAVKAARAYVQSGKRVVVDVDLAKFFDRVNHDILIDRLNRRVDDAGVIRLVRAYLNAGIMDGGVVVDRHLGTPQGGPLSPLLANVLLDEVDKALEARGYCFARYADDCNVYVGSKKAGERVMAYPYLRRLYVNLKLQINEAKSAVASAFGRKFLGYALWVAKGREVKCKVAQKPLQNFKARIRQLTRRSGGRSMAQVVDKLRPYLLGWKAYFGMAQTPGVWRGLDEWLRHRLRAIQLRQWKRPKTIHRELKALGASDDVAKQVAGNCHRWWRNSDGVIKRVLAIAYFDRLGVPRLS

SEQ ID NO: 571 - protein, 450 aa, synthetic construct
MQQKTYRDPDAGRRGEAPDAGSQGAETVQAPTTRESPSSTAWLMEAICEPVNLRHALKRVKANKGAAGADGMSVSELPDYLRHHWPELKAQLLSGSYRPSPVRRVTIPKPGGGERLLGIPTVVDRFIQQAMMQVLQAQWDATFSDSSYGFRPGRSAHQAVKQAQKYIESGYSWGVDLDLEKFFDRVNHDVLMSRIAKRVSDKRVLSLIRGYLNAGVMEAGLVMPVTEGTPQGGPLSPLLSNLLLDDFDKELEKRGLKFARYADDCNVYVKSERAGNRMMAGLTHWLNRKLKLKLNAKKSAVALPETRKFLGYSFRRGRKVWCVVSPESVKRFKTRIRELTGRNTGKSLEQLIEPLKRYLTGWKSYYGLNQWQTLMRDLNRWIRRRLRSVLWKQWKTGSKRFKELRRRGVSKDLAAQTVGSCHKQWRISCSPALSIALPNRLFVRLGLPEL

SEQ ID NO: 572 - protein, 469 aa, synthetic construct
MRSQEGRRQQKAPEGAYLWEEMVKPWGTTGGPSPSSAQGGATPRGGQGSGLMEQVVERSNMLAALRRVERNGGAPGVDGIPTERLRDQIRAEWPRIREELLAGTYRPKPVRRVEIPKPGGGKRLLGIPTAVDRLIQQALLQVLTPIFDPQFSEASYGFRPGRRAHDAVRKARQYVEEGYEWAVDLDIEKFFDQVNHDILMARVARKVTDKRVLTLIRRYLQAGVMVNGVVIETGEGTPQGGPLSPLLANILLDDLDKELEKRGHKFVRYADDCNIYVKSKRAGERVMASIRKFLQERLKLKINEQKSAVDRPWKLKFLGFSMHKRKTGEILIRLAPQAIERVKGKIREITARNKPVSMAERIERLNTYLGGWIGYFALAETPSVFEEIEGWMRRRLRMYLWKQWKRVRTRYRELRALGLSEWVVHQFANARKGPWRMAHGPMNRALGNAYWQSQGLMSLTERYQSLRQA

SEQ ID NO: 573 - protein, 459 aa, synthetic construct
MVKPLRLDRRAERSPTPSEGMSEAVGEGVWEQVFERKNLLSALKRVEANGGAPGVDGMTVEALRPYLKAHWLELRAALDSGNYRPSPVRRVEIGKPDGGVRLLGIPTVVDRLIQQAIGQVLTPLFEPVFSPHSYGFRPGRRAQDAVEAAQGYIREGYTWVVDIDLEKFFDRVNHDKLMARVARAVKDKRVLKLIRRYLQSGVMVNGVVMETEEGTPQGGPLSPLLANIMLDDLDKELERRGHRFVRYADDCNIYVRTERAGERVMDSVRGFLEKKLKLKVNEKKSAVARAGQRKFLGFSYFYRKGEVLIRVAEQAQQRLREKLRGLTRRTRSGRLEEIIQQLKEYMRGWMGYFRLADTPSVFAGLDHWLRRRLRQLLWKRWKRGTTRWRELVSLGVPRRLAGLGATGSSPWRMAGTPVVHMALSNAFWDAQGLCSFTEYYHQLHLPRRTAGCGPACPVV

SEQ ID NO: 574 - protein, 456 aa, synthetic construct
MGEVRVKPGGTPRGRSIDRQDLKLILRREKYRMDLMEQMLSRENMLQALRRVEANKGAAGIDSVSTRQLRAHVVQHWETTKAKLLAGTYKPSPVRRVEIPKPDGGVRLLGIPTVMDRLIQQAILQVLTPIFDPTFSPHSYGFRPKRRGHDAVRQAQEYIREGYRYVVDIDLEKFFDRVNHDILMSRVARKVKDKRVLKLIRAYLKAGIMAEGIRVRSEEGTPQGGPLSPLLANILLDDLDKELERRQLRFVRYADDCNIYVKTRRAGERVKRSITKYLEKKLKLKVNEAKSAVDRPWKRKFLGFSFTFHKEARIRIAPKSLKRVKDKIRSLTRGNHLTSMETIIEDLNRYLMGWMGYYALMDTPSTLKALDEWIRRRLRLVLWSRWKRVRTRYRMLRALGLPERDVHKLANTRKGAWRTSKTPQMHKALGIAYWKSQGLMSLTERYFEIRQGWRTA

SEQ ID NO: 575 - protein, 453 aa, synthetic construct
MKETKKCDESRQLNIQTGHLQKDRVELESYAKAPSISVTSDNRQNARRECHYGLLENIISSENLNEAFKRVKKNKGSHGEELRQSIADGSYKPNPVRRVEIPKDNGKIRPLGIPTVVDRVIQQAISQVLTPIFEKKFSENSYGFRPNRSAHQAILKCKEYMDEGYRWAVDIDLEKYFDTVNHDKLIGLIYKEIKDIRVIGLIRKYPNAGVMEKGLTSLTLEGVPQGGNLSPLLSNIMLNELDMELERRGLRFCRYADDCNVYVKSKKSAERVMKSITKFIEKDLKLKVNKEKSKVDRPWKLKYLGYTFYTKKGEMGIRVHQVSIKKLKGKLKSITGRSNAMSMELRAVKLKQLIVGWIGYFKLADMKSTLRELDEWLRRRLRLCYWKQWKKIKTKHDNLVKLGVENWKAWEHANTRKGYWRISNSPILATTLTNKYLREQGFITLSERYSQVR

SEQ ID NO: 576 - protein, 455 aa, synthetic construct
MSMCEALRQMPERSGRVPLADGEAGRASASDEATRPRHETGSTGSALLMAALTRENLQQAWKRVRANKGAAGVDGRDIPETACYLRTAWPVIRDQLLQGTYRPSPVRRVTIPKPDGGERELGIPTVTDRLIQQALLQVLQPLLDPTFSENSFGFRPGRSAQEAVVRAQAYVQSGRRIVVDVDLEKFFDRVNHDILLGRLQKRIGDAGVLRLILAYLNSGIMQNGVVVSRYQGTPQGGPLSPLLANVLLDEVDKELERRSHCFVRYADDANVYVRSQRAGERVMALLRKMYAKLHLTVNEAKSAVASAFGRKFLGFSFWVAPQGEIKCKVAAKPMATYKQRIRQLTRRSGGRSMAEVVENLRPYVLGWKAYFRLSQTPGVWRTLDEWMRHRLRAIQLKHWKRGPTMYRELKALGASETVARRVAGNARSYWRNADRLLKTILTIAYFDRLRVPRLS

SEQ ID NO: 577 - protein, 419 aa, synthetic construct
MMMEQVVSRQNMLAAYQRVVRNHGSAGVDGVTVEDLAEYSRLHWERIRTELLEGRYQPQPVRTVMIPKPGGGERELGIPTVMDRMIQQAVHQVMSPQFDAGFSEASYGFRPGRSAHGAVERAREHMTAGHRWVVDIDLERFFDRVNHDVLIARVSHTVKDKRVLRLIGCYLSAGLMQGGVVSPRSEGTPQGGPLSPLLSNILLDVLDKELERRGHRFVRYADDCNVYVQSRRAGERVMGSLRVWLEKRLRLKINASKSAVDRPWHRKFLGYSVTTQKRPRLKVSAESVKRMKQRLRELLRIGRGRSLRTVIATVAVYLRGWLGYYRKAEVRNVFEDLDQWLRRKLRRIMWKQWKKPKTRYRKLRAYGVAPDQARRSAWNGRGPWFNAGASHMHLAVPTKLLRNWGLPSLLDEHQRLQRL

SEQ ID NO: 578 - protein, 484 aa, synthetic construct
MISMQTVKAEVSERAAETQSTDRKSTKLPLGADVGAATSEQTKSEGHSLMEQVVERSNLWLAYQRVVRNKGAPGVDGLTVGEFKDWLKMHWPSVKKALLEGDYLPRPVRRVDIPKASGGMRTLGVPTVVDRLIQQALHQVLQPLFEPTFSQGSYGFRPRRTAHQAVRRAQSYIREGKRWVVDLDLEKFFDRVNHDVLMARVARQVRDARVLKLIRRFLEAGMMREGLVEPRSEGTPQGGPLSPLLSNILLTDLDRELERRGLAFCRYADDCNIYVGSRVAAERVMGGIRTFLEEVLRLRINPAKSAVARPWERKFLGFSFTAQREARLRIALQSVRRLTERVRELLRAGRGRSLAHTIDTLNPLLRGWISYFQLTQCKGVLEELDGWVRRRLRCVLWRQWKRSRSRARHMRALGLDAARARCSSQNGRGSWWNAGASHLHQALPAAYFKLGAGLAVARATATPVCSLNRRMRNRTSGGVGGRRA

SEQ ID NO: 579 - protein, 467 aa, synthetic construct
MKEGKQKISKDTCQQKDRAEPDGYAGGQTFIWMTENNITNVDNSKYGLLEYILSPQNLNAAFKRVKSNKGSGGIDKMEVESLGDYLICHKESLIQSILDGNYRPNPVRRVDIPKDNGQKRSLGIPTVVDRVVQQAIAQVLSPIYEKQFSPNSYGFRPKRSAHQALIKCKEHITSGYKYAVDMDLEKFFDTVNQSKLIEILSRTVKDGRVVSLIHKYLRAGVVVRNKFEESKMGVPQGGPLSPLLSNIMLNELDEELEKRGHHFVRYADDMLILCKSIRSAKRTKATIIAYIEGRLFLKVNKDKTCVAYISKIKFLGYSFYVNKKKGRLRLHPKSLAKMKEKIRALTSRSNGWGDAKRKLELKQYITGWLNYFKLADIKSLLSRIDEWYRRRLRMVIWKQWKRVRSRGRNLIKLGIAKYKAWEYANTRKAYWRTSNSPILNTSITNERLKQAGYIFFADYYRKVNGVN

SEQ ID NO: 580 - protein, 465 aa, synthetic construct
MKGRMQKISKDTWLQKDRAEPDSYAAGQTFMRITENNLTDVTTLEDGLLEQILSPSNLNRAYKKVRSNKGKGGVDKMGIEHLQDYLVENRVELLQSIRDGKYRPKPVRRVTIPKENGKKRLLGLPTVVDKVIQQAITQVLSPIYEKQFSAYSYGFRPGRNAHQALKKCRDYISDGHIYAVDMDLQEFFDKVSHSRLVEILSRTIKDGRVISLIHKYLRAGVMIGNKFEETELGVPQGGPLSPLLSNIMLNELDKELQRRGHRFVRYADDLMIVCKSKRSAGRTLRNIIPFIEDKLFLKVNREKTNVSHVSKIKFLGHTFYRSHGKGRFRAHPTSIRKMKQRLKQLTSRSNGWGEDQRKESLNHYVRGWVNYFKMADMKSLLRKIDRWYRRRLRMCIWKQWKRIRTKGKMLIKLGLNKWKAWEYADTRKSHWHIANSFILTRTITTHRLRQAGYPFLLDYYSKVRT

SEQ ID NO: 581 - protein, 470 aa, synthetic construct
MRGVKPTMEKKLTKMKVSNQSGYTGFSIFSLGEICLEEVTDGYNLEKALKCVARNKGAPGMDGVETKDYALHRQIAGFKDLIDDISAGTYRPKPVKRVYIPKENGDKRPLGIPTVEDRVVQQALANILSKYYEEEFSDNSFGYRPGRGCRQAVKRALKYVNGGRQWVIDLDLSKFFDTVNHSKLLQILSEKIKDGRVISLIHKFLRTPIYENGVVSPKSKQGTPQGGPVSTILANIILNECDQMMDKENIKFVRYADDMMIFCKSKEAAERTLNKVTKFLEKTLFLTVNKEKTKILWYTHGTQFLGFTLSQYVPKHIKKIAPKCKVYVKVHPKKREKFQKGIKETLDRRAPGGIEETKKKFNQKIRGWFNYFKGSIPQKWMEETDAWMRRRIRQMYWKQWKTPQNRMENFSKLNPKSPSRRDYAYSNNSYWRMARTKQMHNALSNRTLTSMGWLSLQELNAQYLQEMSGN

SEQ ID NO: 582 - protein, 424 aa, synthetic construct
MELLEQILSNSNLNEAYKKVYRNKGASGVDGVTINELKEYLQNNKHKLLSEIRARKYKPQPVKRVEIPKASGGVRKLGIPTVVDRVIQQAINQVLTPIYEEQFSESSYGFRPRRSAQGAVLRSLELINDGYDWVVDIDLERFFDTVHHDRLMNIISRTIEDGDVISLIRKFLVSGVMIDNKYEDTIIGTPQGGNLSPLLSNIMLNELDKELEIRGLDFVRYADDCIILVSSKKSANRVMASVTNFIEKKLGLKVNVTKSKVDRPNNIKFLGYGYYYDGKEGKYQLRPHEKSIQKFKRTLKRLTKRSWSVSLNYRLFKIRQVIMGWIQYFKYGKMKSKLKVIDSKLRARIRIVIWKQWKVPKKQINSLMKLGISLDEAKGITYCRKGYQFIGHSKVIQKAINNSRLKKRGLTSALDHYLKVQTVI

SEQ ID NO: 583 - protein, 424 aa, synthetic construct
MELLTQILSNSNLNEAYKKVYRNQGASGVDGVTINELKEHLRENKHKLLSEIRTRKYKPQPVKRVEIPKANGGIRKLGIPTVVDRVIQQAINQVLTPIYEEQFSDSSYGFRPLRSAQGAVLRSLELINDGYDWVVDIDLERFFDTVHHDRLMNIISRTIKDGDVISLIRKFLVSGVMIDNKYEDTIIGTPQGGNLSPLLSNIMLNELDKQLEIRGLHFVRYADDCIILVKSKKSAERVMTSVTNFIEKKLGLKVNATKSKVDRPNNIKFLGYGYYSDFKEGKYQLKPHEKSIQKFKRKLKRLTKRSWSVSLDYRLLKIRQVIMGWIQYFKYGKMKTKLRGIDSKLRARIRVVIWKQWKVPKKHISSLIKLGILKDQAKGITYCRKGYQFIGHSCVIHRAISNSRLKKRGLTSALDHYLKVQTVI

SEQ ID NO: 584 - protein, 423 aa, synthetic construct
MELLDKILERENLNKAYKHVKANKGAPGVDGVTVDEAYENIRQNKEKWLHQIRKRTYKPQPVRRVQIPKENGKMRNLGIPTVFDRIIQQAMVQVLSPIFEEQFSETSYGFRPGRCCENAVVKALEYLNDGYEWIVDIDLERFFDTVDQDRLINIIMRTIKDGDVVSLIRKYLSAGVMDKGVTKATEKGTPQGGNLSPLLSNIMLNELDKELEARGLRFVRYADDCIILVKSEKAANRVLESITKYIEKKLGLKVNAEKSKVTRPTKTKYLGYSFWKDTKGKWKPKPHLKSYQKIKRKLKQLTCRRISISLDERIKQINYAIRGWVNYFRIANMKNAIQEIDEHLRTRVRVIIWKQWKKASRKEKALLQLGVKPDIAHNLANTSKGYQLVAKTDWLKFAINIERLRKRGLIFLSDQYQKVHVEI

SEQ ID NO: 585 - protein, 463 aa, synthetic construct
MNAENLIDESCPQRTSAEHEKYAGAQSAAPRESEAEDRADLLERILDRDNMNEAFKRVRANKGAPGIDGMTVEAALPWLIEHGKELIDSLRDGTYKPQPVRRKEIPKPDGGIRKLGIPTVIDRMIQQAITQQLTPIYEPIFSDNSYGYRPHRNAQMAIRKAKEYADEGYTVAVEIDLTKYFDTLNHDLLMNTVREEVKDKRVLELIKKYLKSGVMANGLLIKTEEGSPQGGPLSPLLANIYLNKYDHEMTRRGVKEIRYADDIVLFAKSKRAGERLLESSRRYLEKKLKLKLNSEKSKVVSTYSPRKFKFLGYALGKSRQGTFIRIHAKALKKAKEKLKELTSRSQGRKICEVFARLKRFVNGWINYFGIARIKKTLEDWDGWLRRRIRMYIWKQWKKTRRRKENLMKLGVPEWRACEAAYSRKAYWRSAKHASVHSALTNERLARAGYYSLSERYESLHLYD

SEQ ID NO: 586 - protein, 459 aa, synthetic construct
MVRSRKERMREEDKSRPNTRLCEQLISLANIQQAVKKVMQNKGSAGIDGMEVTELPSYLEANWALIREQIVTRTYKPKPVLRREIPKDNGGMRLLGIPTAVDRVIQQALVQVLTPVFEPTFSDFSYGFRPGRSAEDAVRLAQTYMSEGYKHVVDLDLSKFFDTVDHDILMGLIDKHMDDKDVRRLIYVYLKSGVMTNGSMAVTALGTPQGGPLSPLLSNVYLTPYDRELEKRGLRFVRYADDCNIFTKSKMSSYRVRDSAKSYLERKLKLKVNMEKTEARRAVGSTFLGFTFRTYGKRGKLGMTVPHEKKLKKLEDRIRLVTKRNRGVSIGMVIRDLNSILRGWVGYFARSAIKNYLERLMEWIRRRIRQYLWKQWKSGKNRKHRLRQLGVDEWKLKKWKLGSNSYWKMAGTMNYLIDKESIHGRYGLVDILGYYNKLHAQRMESDGIVLDVRYNSLFG

SEQ ID NO: 587 - protein, 434 aa, synthetic construct
MELIEVILSKENLNRAYKKVVANKGASGVDGVGVEELGDYIRENKDVIITSIRNRTYMPKPVRRVYIPKENGKQRPLGIPTVLDRTIQQAIAQPIWDIYEEIFSEYSYGFRPGRSCHDAIRQALYYLNDGYEWVVDIDIEQFFDKVNHDKLIQILGEQVNDSTTLNLIRKYLKAGVMEKGLEKATITGVPQGGPLSVVCSNIYLDKLDKELEKRGLRFTRYADDVLIFTKSEMAANRVMKSIRSWLERKLFLKVNGTKTKVVRPTRSKYLGFTFVKNSTEWKVRPTNEKKKKLKKKLSEYLKRGKAVARPLAVTIKRVNEIVRGWINYFRIGMMKQFMQELGEWLRHKIRVIVVKQWKRPKTIYRNLSYLNWKYKIGCKQEEIFKVANSRLGWYRRCGMSVVNFIISKDLLENRIKDGVGLLNPLSYYLVKVGI

SEQ ID NO: 588 - protein, 472 aa, synthetic construct
MDAERQQGRAYQLTFNFEGDAETLRHDQGGDDGIGTARPEEPQTSTASDPARALTERLMEEVTRPENLNRAYRKVKANKGAPGVDGMTIGDLRAWIAMHKEELIASLLDGSYRPQPVRGVQIPKPGGGVRQLGIPTVVDRLVQQAILQVLEPLLDPTFSPSSFGFRPGRGAHDALKQARQYVADGRVIVVDVDLEKFFDRVNHDILMARLARKVADRRLLGIIRRFLQAGLMQEGVCVARHEGTPQGGPLSPLLANLLLDDLDKELERRGHHFCRYADDCNIYVQSKAAGQRVLGSVTRFLEVVLRLRVNRDKSEVAYIEERKFLGYRLLSGGRLGIAPKSLERAKDRIRQITRRNRGVSVDRMTSELNSFLTGWVSYFRHAACKSHLTELDGWIRRKLRCVRLKHCKRSKTLADFLGSHGVAQHTAWVTALSGKGWWRLSGSPAAHQAMDQRWFASLGLINLAHRHTTLNR

SEQ ID NO: 589 - protein, 490 aa, synthetic construct
MSKAEYRQLTFAFADSPQGAGPAALTDVSVGKAWLALTAEVKEGNDSAAWTADTGRLLESATSAPNLAQALLNVARNKGAAGVDGRSVDEVVAAGPRLLPYLRRELLAGTYRPGDIRRVWIPKPGGGQRGLGIPNVVDRWVQQAVLQVLQPIFEPTFHASSHGFRPGRGAQTAIDEAKKYLAEGFCFTVDIDLSKFFDRVHHQRLLNRLAQQASDGRILKLVHRMLKAKVVLPDGTRITTEEGAPQGGPLSPILSNIVLDELDRELARRGLRFVRYADDFSVFVRSERAGRRVMDSIRKFIEGRLRLEVNEEKSSVSRPNDLTFLGFHLGKSPDGKVTVTPSQRTKERMDLRIRELTPRTWGQSVAACIEKANSYLRGWFGYFRLCTEEGVLSFGRFDAHIRRRIRAVIVHQKKRPRHLYRHLLDRGVSCGMAAKAAFQRRGLWHRSISFGMHKAYPNAWFADRLMSLKEEWQRLHPPEQVSYKQLLLFE

SEQ ID NO: 590 - protein, 471 aa, synthetic construct
MGAGVPEKKIEISEVDLHGGSRKLPRGRISGANFPGTEGQPDPRKPDLIEMMLERGNLLEALHRVESNRGAAGVDGLTVSQLRQYLRVHWAGIKEQLLKGEYQPRPVRRMDIPKAGGGTRMLGIPTVLDRLIQQALHQILSPLWEPWFSAHSYGFRPGRSAAQAIKTAQKHVQSGHRWVVDMDLEKFFDRVNHDVLMARVARRVKDQRVLKLIRRYLESGIMLGGMVEQRTEGTPQGGPLSPLLSNILLDDLDKELERRRHKFCRYADDCNVYVGSQRAGERVMKSLTQFLQAKLKLTVNPTKSAVDKPWKRKFLGFSLTAERGIRIRVATPSVKRLQDKLRAKFREGRGRNLRTFIEGLKPLLRGWANYFSVAETRQVFEKLDEWIRRKLRCMEWRKWKRPKTRLQRLTALGLDRERARLGAFNGRGPWWNAGASHMNAALPTSYFHKLGLILLTEEVDWQTALRTARSL

SEQ ID NO: 591 - protein, 464 aa, synthetic construct
MRTDDAEAYVSAASTGKGRRNRLGSGAGAEVRTAAVGRTKPEALRLMEAAVERSNMLCSYERVVKNKGAPGVDGLTVAAFKPWLQAHWPRVRQALLAGEYMPAAVRKVEIPKPQGGVRMLGIPTVLDRLIQQALHQVLQPLFEPEFSESSYGFRPGRNAHQAVKAARGYVAEGKRWTVDLDLEKFFDRVNHDVLMARVVRKVNDERVSKLIRRYLEAGLMEGGVVSARTEGTPQGGPLSPLLSNILLTDLDRELERRGHGFCRYADDCNIYVGSKRSGQRVMRAITAFLEQRLKLKVNAAKSAVARPWQRKFLGYSMTWHKKPKLKIAHQSRERFAEKVRRTLREARGKSLKRAVERLNPVLRGWVAYFRLTEVKGVLEELDGWLRRKLRALLWRRWKRNYTRAKNLMRRGLSERRAWLSATNGHGPWWNGGSSHMNEACPKSWFDRMGLVSLLDTQRRFSSVS

SEQ ID NO: 592 - protein, 467 aa, synthetic construct
MTTENRRKEEAKTEESGRNPVLPLNSAMVDETKREESLLPDNQRYIPIPKIEGVVSDYNIQEATKAVIRNKGAPGIDSITTEEIEGILQKEWPKIKQEILDGKYRPSPVRRVEIPKPDKNGVRKLGIPTVMDRIIQQAIYQELMFTFEAIFSENSYGFRRSRNAQQAVLKAQGYIQEGYEWVVDMDLEKFFDKVNHDILMAKVARRIKDKKILLLIRRYLQAGVLENGLVKPSEEGTPQGGPLSPLLSNIMLDDFDKELERRGLRFVRYADDCNIYVKTEIAGQRVMKSAIKYLTTRLKLKVNEEKSAVAHPWERKFLGFTFKKEEPGKIAIHESRIKRLKDKIRGLTKKMRDGNLTVSIRKFIMPIVRGWTNYFGIAEEQGIFASLDGWIRRKIRGIQWRQWKEPRTRFKKLKSLGIKEQTARNHGYSSKGPWKMARSHVMHKVFSNSTIESMGYIPMAKLVCARS

SEQ ID NO: 593 - protein, 409 aa, synthetic construct
MYEALRRVEGNKGAAGIDGMEVKDLRPYLKAHWQEIKGQLLEGTYKPKPVRRAEIPKPDGGVRFLGIPCVIDRLIQQSLLQVLTPIFDPGFSEHSYGFRPGRGAHQAVQKAKEYVGEGYTYVVDIDLEKFFDRVNHDALMARVARKVEDKRVLKLIRAYLNSGIMVDGVCIRTEEGTPQGGPLSPLLSNVMLDDLDKELEKRGHRFVRYADDCNIYVKSQRAGERVMGNVKRFLGERLKLKVNEAKSAVGKVNARKFLGFTLSSGKRSRIRIASKALERLKDRIRELTRRSWGIRMGERIRRLNVYLRGWIGYYRLAESLSVLNQLDGWIRRRLRVCLLKQWRKPKARWRNLVKLGVSEEWAYMISGSRKGCYRLSLTHQLNKALGLEYWKKQGLLSLAETYLNIRIAL

SEQ ID NO: 594 - protein, 439 aa, synthetic construct
MTEAVGEGVWEQVFERKNLLSALKRVEANGGAPGVDGMTVEALRPYLKAHWLEVRAALDWGSYRPSPVRRVEIGKPDGGVRLLGIPTVADRLIQQAIGQVLTPLFEPVFSPHSYGFRPGRRAHDAVEAAQGHIREGYTWVVDIDLEKFFDRVNHDKLMARVVRVVKDKRVLKLIRRYLQSGVMVNGVVMETEEGTPQGGPLSPLLANIMLDDLDKELERRGHRFVRYADDCNIYVRTERGGERVMNSVRGFLEKKLKLKVNEKKSAVARAGQRKFLGFSYFYRKGEVLIRVAEQAQQRLREKLRGLTRRTRSGRLEEIIQQLKEYMRGWMGYFRLADTPSVFAGLDQWLRRRLRQLLWKRWKRGTTRWRELVSLGVPRSLAGLGATGSSPWRMAATPVVPMALSTAFWDAQGLCSFTEYYHQLHWPRRTAGCGPACPVV

SEQ ID NO: 595 - protein, 484 aa, synthetic construct
MSSLRNEQGRQKLSDRETGEPTQQVKPEGEVQSAEPFPARDDGKSDESDGLSLSKPVWEAVFARANLFAALKRVESNKGAAGVDGMTVKELPAYLKAHWLEVRDALESGKYRPSPVRRVEIPKPDGGVRQLGILTVLDRLIQQAIAQVLTPMFEMAFSPNSYGFRPGRSAHQAVERSQEYIREGYDWVVDIDLEKFFDRVNHDMLMARVARVVKDKRVLKLIRAYLESGVMLNGVVMDTEEGTPQGGPLSPLLSNIMLTDLDRELEERGQKFVRYADDCNLYVTPALAGGARETERAGERVLESVKQYLEKKLKLKVNPKKSKVERATRAKFLGFSFWKRKGEVFIRLAKRTKERFAEKIRYLTKRTRSGKMEDIVSEVNRYTRGWIGYFRLATTPSVYQEMDEWIRRRLRQIQWKRWKRGRTRYRELVRLGVPPKRAALGAVGTSPWRMSHSPIIHEALSNAFWRNTGLESITERYNQFRYSH

SEQ ID NO: 596 - protein, 466 aa, synthetic construct
MKSGGEWRQQLLPFEAEAPTGGAGQNSAGPAGVSRAPWRQPDPASARPTLLREIVRERVLEAAWKQVRRNRGAPGIDGMRVGDFEEWIGVHGDQVRAEILAGTYEPQPVRRVEIPKPGGGVRLLGVPTVLDRVIQQALVIVLTPILDPTFSESSYGFRPGRSAHGAVAAARRHIADGYRWVVDLDLSKFFDRVNHDVLVDRLWKRLGDGPLLSLIRRYLKAGVLIEGVVVESVEGTPQGGPLSPLLSNVLLDEWDRELERRGHRFVRYADDCNIYVRSRRAGERVLASCRDFLERRLRLKVNEEKSAVARPWARQFLGYSVTNGKKPKQRLAKRSVVRLKERVRAITSRSRGISLEQMLRELSRYLRGWSGYFRRIETPSVLEQLDSWIRRRVRSFLLKQWKPGRGRRRAIQKLGVDDGWRLSASRKGPWRLSRGKVISAALPNATLEQRGLVNLKQEWKRLAELF

SEQ ID NO: 597 - protein, 415 aa, synthetic construct
MTTECTMEAMFNWLNLEEALEAVKRNKGAAGIDGKSIAETEQHIEEYWTQIEAKLMAGQYIPSQVKGVKIPKPNGEKRLLGIPTVQDRVIQQAMNQQLSKAFDREFSINSYGFRPYMSAQQAVKQAQLYVQQGKHWVVDIDISAFFDEVNHDILLHQLSQKVTDKRVQGLIRKYLKTGIMIEGKLERRGKGMPQGSPLSPLLANIYLDRLDKELEKRGLSFCRYADDTSLYVSSERSAKRVLESLTQWIEKHLKLNVNQSKSGTGRPWESQFLGFRIGKDGEIGIAPKSIERYKEKVRKLWDARQSLTSKQLIEQWQKYSIGWWNYFKLATKRWTIRCWVGWTRRHIRKCFWQRWHNKKGRLNALRRLGVSEYLQKTASSSRGAWRIASSPALHKALSNATLRRYGLDVPPLSAA

SEQ ID NO: 598 - protein, 422 aa, synthetic construct
MGKQRSMTPHQPSLLMLRIVERNNLQRALKQVQRKKGAPGVDGMTVEELPDYLRAHWPQLREQLVGGTYRPKPVKRVLIPKANGKQRKLGIPTVVDRFVQQAIAQVLSEYWETKFHPDSYGFRPQRSAHQAIRRVQAYTRAGYRTAVDLDLESFFDEVNHDRLMRALHRTHPDTDVLQLVNRYLKAPVSTCDGRLSSEKGVPQGGPLSPLLANIVLNEMDWELERRQLRFARYADDCQILVGSHQAGQGVMASLTRFIEKTLRLKVNREKSAVADVHERTFLGFVLTRRDQRIRVSGKVLEKLKATVRTVTRRTRGHSFRKILEELRRSLLGWKAYFDASEVLSPLKELDKWIRRKLRCYLWKQWGRAGYRRLRELGVSRQLAWNTAKSAHGPWRISHSPALYHALPTSYFRSLGLPELAAR

SEQ ID NO: 599 - protein, 456 aa, synthetic construct
MSLKHAMHQMLGQPGRANVGEGEPQLDVVSDEASLAGHTQEGSGQEDLLQQILLRENLVKAWKHVKANKGSAGIDGLTIEQTTEYLKTHWSKIREELLSGQYRPQAVRCVEIPKPGSGTRELGIPTVVDRLIQQAMLQVLQPLIDPTFSNFSYGFRPARSAHNAVLKAKRYVEEGYQIVVDIDLEKFFDRINHDILIDRLSKKIPDKSVLGLIRRYLQAGTMVNGVVMEREEGTPQGGPLSALLANVLLDEVDKALERRGHKFARYADDCNVYVHSQRAGERVLQSLRCIYAKLHLKVNEAKTTVGTVFGRKFLGYCLRRWSGDTVKIAVATKALETFKQRIRLITCRVGGRSMIQVAERLRAYLPGWKSYFRLAQTPTTFKDLDSWLRHRLRAIQLKHWRRGSTTYRELRKLGATHEMASLMAGGAGHWWRHSKFNLNMVLTVAYFNNLGVPWLT

SEQ ID NO: 600 - protein, 458 aa, synthetic construct
MKNGEEPSPDSTRRLSRPGQAAAAPSEKPSPSLFPERMMEVIVDSANMQRAWDQVRGNRGAPGPDGVTLTQFPEWFRPQWAVIRQQLLDRTYEPSPVRRKTIDKPDGGQRQLGIPNVLDRLIQQAIQQVLTPVFDPGFSDSSHGFRPNRSAHGAAKQVERTIRRGRRFVVDMDLSKFFDRVQHDVLMSRVARKVRDRRLLKLIGRYLRAGVMVEGVLQSSPEGTPQGGPLSPLLANILLDDMDKELERRGLPFVRYADDFVIFTKTRRAAERVFNGVNRYLTKVLRLVVNLEKSRILPADGVEFLGFVFRGVTGTIHVSEKSVQKCKRWIRELTGRSRGISMTQRLGELRRYLQGWAGYFALAKQMRLFENLDQWIRRRLRMCLWKCWRFVRTRVQNLLALGVPRRQAFRHAKSRQGPWHMAKTIASGVGMTNAWLHDQGLVSLKSLWVKRAPLRRTA

SEQ ID NO: 601 - protein, 422 aa, synthetic construct
MKKWYSLIDKVYRLDNLKRAYRAVRANKGAPGVDGETVEAFGQNLEERLHQLHHELKTGTYEPQPVLRVEIPKADGSKLPLGIPTVKDRVVQQALLNIMQPIFEPDFHPSSYGYRPGRSCHQAVAKSERFMNKYGLEYVVDMDLSKCFDRLDHELILEGVNRKVSDGSVLRLIKKFLTAGVMKNGAWEETDIGSPQGGVFSPLIANIYLDRFDQDMKRRGIRIVRYADDILIFARTHREARKYQKLATEILESELKLVVNKEKTHLTSVKKGVTYLGFIIKSKFVSIHPKKIKSFKDRIRQLTPRNHGINVEEMVKRLNPVLRGWANYFRVANCKMLFLQLMEWIRRRLRMKQMKEWKSWKPLHKALRRRGYKGEFRKISVTRWCNSASPLVNMALPNSWFNEIGLINLASYNVGILHHFWE

SEQ ID NO: 602 - protein, 428 aa, synthetic construct
MGDTMTKRKHHSLYGQILQRLDTAFAKVKANRGAAGIDGESIAEFEQDLEANLAQLKRDLKEKTYAPQPVRRVYIPKASGGQRPLGIPTVRDRVVQQALRLVLEPVFEPLFCDSSYGFRPGRSAHQALDRVSGHLREGYKWVVDCDLKSYFDTIPQEALIDRVAEEVADGTVLKLIRSFLQAGVMSEGQLQRTIAGTPQGGVISPLLANIYLHGFDQLMEDRGLRLTRYADDFVILCRTQRAAERVMGNVQSYLEGQLGLTVNREKSKVVHLSEGFVFLGYEFGTWGRRPGPKAILRFKQRIRELTRRNQTIPVDKMVREQLNPYLQGWAGYFGYGQVRQRFLDYDKWIRRRLRMVQLRSWRHMKGLHRAMRQKGWKGPLPAVYVNMRRWRSSVHSLVNYALGPDWIRGLGLVSLVDFHRPTMVTVTR

SEQ ID NO: 603 - protein, 390 aa, synthetic construct
MGQMLEAIADPANLAAAWAKVRANAGAAGVDGQSIAAFDADSEHQLVRLRRRLLSAERYVPPPVLRVEIPKPDGRMRPLGIPTVADRVVQQATRQVIEPHFEAEFLPCSFGYRPGRSAQRAAVWWVKEAIRRGDRWVAEFDVEGFFDHLSHARLLRQVAKKVDDPEVIGLVRRWLRAGVFSAEGLVPSVAGTPQGGVISPLLANIYLHRLDVKVRAAGFRLIRYADDFVILADRRWKVKAADRLVRSILSDMGLSVSEAKSGVVRVRDGFEFLGFTIHGRFLRPRPRALASFKDRVRSRTRRQAPVSMSQMIDQLNPLLRGWGTYYAIGDVVSLFEDLDKWIRMRLRSKARKRFKSKGGPDGQKWPNKAFDDLGLVRLEHLARTGKLSPV

SEQ ID NO: 604 - protein, 386 aa, synthetic construct
MKKRKWYSLVDKIWKFSNLEAAFSKVKENRGAAGIDRVSIGQFERQKQQNLLEIQRLLRSKRYEAIPVRRVEIPKSDGRYRPLGIPTVRDRVVQQATFAVMSPIFETKFLDCSYGFRKGRNTHQAIAKMEQYRNEGCEWVVEADIESFFDTVNHELLIDQVAEEISDGSVLKLIRSWLTAGAFKGTEVIETSVGTPQGGVISPLLANIYLHPFDVQMTALGFKLVRYADDFVIMCRSEDEAERAMEAATRILSGIKLRVKAAKTRIVQLSKDDGIEFLGFTIFKEHKVPRTRAVENFKSRIRLITRRQRPATLQEIIKELNPVVRGWGNYFKIANVNWLYKGLDSWMRMRLRSFLEKKKSYEANKRLENKHFSEAGLTTLSSLIGY

SEQ ID NO: 605 - protein, 460 aa, synthetic construct
MASPATECPAGHSAVATKSSAGHRVGFFAARRAAKSQGRRQGQDGQQRSPKPSSGNARAEGPRRVKRKVSSLIDQVYRWENLYRAWRRIRRNKGVHGLDRVTIRNFEADWEKHLREIQRMLMEQRYVPTPVRRVYIPKPADPTKRRPLGIPIVADRIVQQAIFQVVDPLFDSTMSDRSFGYRKGRKAHDAVAALISDAKQGYRFVLDADIASFFDEIDHDVVMSCVRARIADGRVLDLFEAFLKAGVSEDGEVSVPDKGVPQGGVISPWLSNLVLDHLDKAIEKEGWRHARYADDFVVLCRSREEAQRALTVVKEVLETLKLSLHETKTRLTDCEQGFEFLGFHFRHYRLGIRESSIERFKDRVRALTRRWQGRNVDAVLADLNPVLRGWARYFGVAEVSLTFRYLDSWIRMRLRGFKYKRRCYHDNWRLPSKRLKRWGLLSLQQCRPQLRLSYARAVGP

SEQ ID NO: 606 - protein, 451 aa, synthetic construct
MQESGSAKTMTNDETTRPTAVAGLDQPKQAGNIRDRWGWIEHSVWTERMLTRLEASEPTTVWYGLWDKVHSERNLEAAFWAVWRNRGAPGVDGQTVRQFEAQEQAQLAKLREELRSKRYHRQPARRTWIAKPGTLEKRPLGIPAVRDRTVEAALKQVLEPIFEQDFAEHSYGFRPGRGCREAVKRVEALLGQGRVWCVDLDFKSYFDTIPHERLLGLVQQRVVDGSVLALLAQGLKAGVLETLKGWQPTEVGTPQGAVISPLLANLYLNPLDHAMAERGWEMVRYADDLVVLCQSREEAEQALAYLRQWSGEAGLSVHPTKTRIVNAHSEGFDFLGWHFRGGKKWPRKKSLQKLRDKLRPLTRRTNGRSLEEIITKTNRILRGWHGYFRESHPTGLSGPDGWVRRRLRAMLRKREKRPGYGLSEADSRRWPNRWFGVQGLFSLEHGSCAYG

SEQ ID NO: 607 - protein, 418 aa, synthetic construct
MKAEGTGQKVHSLIDKVYHRINLDMAWESVRANGGSGGIDKIAIPAFQAVAEVELERLHEELKQGTYRPMPVRRILIPKKGKPGEKRPLGIPTIRDRVCQQALKNRLEPIFEPLFSECSFGYRPGRSTHQAMRKMYREILDGYEWIVDADLRDFFGTVHHEPLIDRIAEQVSDGRILKLVRQMLEAGYMEDGKKYATPSGTPQGSVVSPLFSNIYLNRFDHEMTSKGYRLTRFADDWVVLCKTRAEAARAIRDARTILESLGLTLHPEKTKITHIKWGFEFLGYKLKRGKGLSLPQEKVKKQPKTNIYAFPKAKSVQSFMDTIRTRTHRRIPLTVFQLIDSINPVIRGWGNYFRKAHVRKLFNRLQRWIVRRIWSHRYKRWRNAGWKKLPESILYSKYNLVNLLSLIPDLNLRTAPKG

SEQ ID NO: 608 - protein, 431 aa, synthetic construct
MEVTRRDRVKAGLLENILSRDNMLAALKRVKANKGSHGVDGMKVDELPAYLKAAWQTIRQSLLDGTYVPQPVRRVEMPKPDGGVRLLGIPTVLDRLIQQAIAQILSDIFEPGFSCHSYGFRPGKGAHDAIRAARDYIRAGYDYVVDIDLEKFFDRVNHDKLMARVARKVDDKRVLKLIRRYLTSGVLVNGVRVASEEGTPQGGPLSPLLANILLDDLDKELERRGLKFCRYADDCNIYVKSKRAGERVMASIGRFIRERLSLKINENKSAVDRPAARKFLGFSFYRKKDDVGIRIHPKSVKRFKEKIRSITNRNWSMSMDERFRRLHSLCAGWIRYFGLADAKTHMRELDEWVRRRIRACFWKQWKRIKTRHDNLVKLGVDSMKAWEWANTRKKYWRIAGSWVLATTLTNQVLEDMGFRNLSKLYSEMTYS

SEQ ID NO: 609 - protein, 471 aa, synthetic construct
MKPIIIEDGRTIVLARGYFSPHRYGTGRFGGFNQIQDGLLADPELLRQVVSTIMCPEERTLIPENDFYPECWEPEKYEADGPLGSIDAFFTTFRRIARHDMYCSTVEQGEWVMAYGTEQLTYRRMNRPLDDKHFRLKSIRLPDESDRALVKKCFEFRVAPAITHCLIVGRAFMREDKPMYKHFKKRTTSKVRDIWAPEPEVKAALRHLLHPLNSAYDMKRSGSPQYAYTKDRNILMNAEPHARNKWMLNADITGFFDHCDWDLVKGYMRFLMKDISAEDKAVLKVMLINPATGGLYQGSPVSGALSNAILRPAAKYMKAFFQKEGRTLTVYADDITVSQGAAIDSTVRKNIVGKIRHAFEKFDLPFDLKPSKTRVSRNNGRKVTGIRINHLDQCTIPLPKYRLLRSMLHRMSSGGDVTMAKSQLKGYLEFARFNDRSGKIDRLIDKYRDVLVDKGMIRPILDPQPVEIPEE

SEQ ID NO: 610 - protein, 541 aa, synthetic construct
MDDKNKLYLINDGKTIVTRFGAITPFHQSKKYEDTLKIPEKFLEDPESLRQLIGFKLFEDRTKIINKNDFYMRDPQVYKKGKQTTLISFLQAAHKVMRLHYENYRVEIFSKYVVVLNCPTIKFTGTQVKETCHIDSKTANGERKPLLISACYKVEDDDERTKIFDLLTLKYAPAIIDVYITTLRLEAAGTKLYQYYKVPTSTKVREIWAPEDSLKDSMRHLLLPLTSAYDMKKKNSTQYAYIKERSIVNNAEVHKDNKYIAKFDIKGFFDFCNWDLSWKYLKFLFPKDKYGKKAELYDDVKNTLKRVIINEQTGGLFQGNPVSGVISNAILRPFSNYILNILEKQADVKNGVFPSINEKNAETESIDPEGNITTKFDGKEYKSFSKYTDPSNEDLRYAVSVYADDITVSSNYPIDWNEAKRISGILRYSFEHLELPFKLNLKKTSIARNNGRKITGVRINHNDVMVVSRVKYMLLKSMCHRIKHGKKISMPKNVFQGNLAYARFVDHSGKIETLIAKYHANLVEFGINLKLPGELADSYVE

SEQ ID NO: 611 - protein, 324 aa, synthetic construct
MLLEKLQIQSNQSLERLERFATSASKRYKVFQIPKRSGGFRIIEQPSKEIKAIQRWLIEALFDEFPIHHSATAYIRGKNIRSNAEVHAESNFTLKLDFENFFPSFTERHLIKFLRNYPLIEKKQINDRDINFISRICLRNGRLTIGAPSSPTITNAMMYQFDTLMSARCAEDNFSYTRYADDVFVSSRSYINVGEIILFVENLLSKYEYASLRLNKDKTAILSRKGRRSITGCVITPQRGISIGRKLKKSIKHKIYESINGRLSSLEATKLMGYLGFLKDIEPNYFESLKKKYGADAIKTITSGNYDEIKLVPLILDDLDDTPF

SEQ ID NO: 612 - protein, 314 aa, synthetic construct
MVSDILDKISKDLLCSRDVLLRMYHRAPHAYKFYDIPKKNGGVRRIAQPAREVKKVQRWVVDNILSSVKPSAFSTAYLEGSSIKKNACMHLHNAYIAKFDFKNFFYSIKFSDVKRTLEVKYGMEEGQSKFIARLCSVSIEGNLCLSIGAPSSPSLSNIVMYDFDEYLAGRCLSLDIVYTRYADDMTFSSNEKGVCFQIEGLIVDALRNTESPELALNHKKTNFISKKYRRTVTGLTLTNDKKSRISLGRDRKRLIKALVHRSIINKLDKEELEKLQGLLGFAYHNEFSFYNSLCDKYGFGVVSNLMKQKSPTIT

SEQ ID NO: 613 - protein, 310 aa, synthetic construct
MELINKLATKLNKSESEVIRFLASAPLKYKVYTIPKRTSGHRVIAQPSRELKEYQRAFISLYRLNIHDAAMAYRERLSIKDNAKFHCKNRYLLKIDLESFFNSITSELFWTIWQQHYEMPNNDEKVLMERLLFWSPGKSSTGKLVLSIGAPSSPLLSNFFMYQFDELVTRHCEKLEIKYTRYADDLTFSTNAKNVLFDMPRYISDTLTTLFGSALIINRRKTAFSSRAHNRHVTGITIDNESDLSLGREKKRYIKHLVHQYRLNKLDKENVFHLKGLLAFAKHIEPKFITSLETKYSAEVITQIFEEQHG

SEQ ID NO: 614 - protein, 308 aa, synthetic construct
MLVINDLGKRLNQSDLAVKAFLENAPRKYKVYRIPKRTTGFRIIAQPAKELKAYQRAFIELFHFPVHECATAYQEGKSIRDNALVHARNPYLLKTDLEDFFNSLTPDIFWQCIEHCSADAPEFLKEERRYVERLLFWQPAKRSKRLILSVGAPSSPVISNFCLLELDRRISEECRHLEVDYTRYADDLTFSTRIPGVLSAIPALIDSLLKQLYNSKLRLNRGKTLFSSRAHNRHVTGVTLNNEGELSLGRERKRFIKHLIHQYDTLDKEDKAYLVGLLAFASHIEPEFIIRMNAKYTTELMDRIRRQQ

SEQ ID NO: 615 - protein, 313 aa, synthetic construct
VVGLLASKLDDKPSPKVVEAFLRDAARKYCVFKIPKRTQGFRVIAQPSRELQRYQRTFLDNFSLPVHSAAMAYRKGQSIKENAEAHLKQKFLLRMDLENFFNSIKPALFCSVWQSFADLPSLDETDVGLINQLLFWCPSQRRGGKLVLSVGAPTSPMVSNFCLYHFDQALTEFCDTERIVYTRYADDLTFSTNMPNVLEKIPKQVQKLLKEKLTGKNYQLRVNRIKTVFSSKRYNRHVTGITLASTGKLSIGRERKRYIKHLVHQFKMGELEKVEDIAHLKGLWAFAKHIEPEFCRALERKYGLVTMQRIKEA

SEQ ID NO: 616 - protein, 319 aa, synthetic construct
MWRYCTDEEAIRSFHLTDGLQCKEGKEIQTLFAVSNHAEVHYHTAYIPKKKGGRRKLLVPDALLGRIQKNILQNVLAERKVSPYAKAYIKGMGIVENALPHSHAEILLKLDIEDFFENITYLMVYQKAFPEKYFPPAIRTMLAHLCCYNDYLPQGAVTSPMISNLVMYSFDEYIGKWCGERKIAYTRYSDDMTFSGDFEVKEVKHKVRSFLGKMGFLLNEEKTRVLKQYQRQIVTGIVVNEGTNISKSYKRSIRQEIYYCEKYGAKSHLQRRNLSEKEEVPYLKQLLGKVNYVLQINPDDKNFQEAKKKIKEMLLKIKG

SEQ ID NO: 617 - protein, 333 aa, synthetic construct
MISTGLWKYFTKEHHKEFVLSLGLLNDTGWPIEKQLRCLYTVSNHTERHYTRLTVPKRDGTIRELLSPDPLLKKIQRNILHNVLEELPVSPHATAYRRGAGILGNAFPHQGRKQVVKLDIRDFYGSITFLMVHRAFPRIYYPPSVATLLTHLCCYQDCLPQGAPTSPTISNLVMKPFDDHMGTWCKERGIIYTRYCDDMTFSGDFDAEPLIRKVRSFLLSMGFELNERKTQILCGGKRQSVTGIVVNEKPQVSRVYRDKLRQELYYCQKHGVASHLLWLNDRQYLPPEPEQIERYLRSLIGRINYVLQVDPLNLYFAEARTTIGNMIKDMESG

SEQ ID NO: 618 - protein, 321 aa, synthetic construct
MASPSQTSKLRMLGLPIFDDLESFAQVTRLSKKFLYLHSSFSDQHYKKYFIPKKSGGQREISQPSKAHKAIQGWILRNILDLLQVSQASKGFAKKQTTADNAIPHIGANAILSLDLEDFFPSITANKVYSIFHSLGYSKPISIMLTSICTCGGKLPQGSPCSPKLANLVCIRLDNRVQGYVGARGVTYTRYADDLTFSAAHPGKLMHIFNFIRRIITEEGFSLNESKTRLAGTRLRKKVTGLVVTEGAVGVGRIKYRELRSKVFNLTKTQDIFYDQKEINEIYGWLGYLKSIDSKRYEKLVSQIETLKKNHKETSLDYLLV

SEQ ID NO: 619 - protein, 300 aa, synthetic construct
MNYSNISTLVKQMLLKIHDDIYKKINQNYIDVFLCGGVSSSRNISVRDIIRKELEKKKGIRILYPEELFMEILNKDKESDLLSLEKFLADNCDIICIICESAGSLVELGAFTNNDATVGKVIAVIEEKRKKDKSFIMLGPIKVIERINNRNVFFYNKNKLEDLSNELSREIKLRRFRGVIKIETEQNKPLNTILGLYYILPLMLYFFKSLEYIELTNYLKYLFKIKGYDDSDFEWLFRSSLKLLYKDRYIYKTTVKEKTFYSLTQKGYNNIYNVLYSIDINNRTLLYDSIRLGIIKSAYY

SEQ ID NO: 620 - protein, 319 aa, synthetic construct
MAKTEIIKLNMLGLPVIQSLDDFSAVTHISKYTIYQLSYHSEKYYKTYDITKKSGGKRTICQPSRKLKGLQSWILVTILNKIQVSQSCKGFRKDSSTLDNAIPHIGANTILNLDLKDFFPTVISKQVFNIFKTIGYNNLISTVFTNICTFEGKLPQGSPSSPMLANLSAWTLDLRIQGYVGKRGINYTRYADDLSFSGLNPSKVVKIIPMIKTIIDSENFVVNHKKTRVASSARAKTVTGLVINEDSVGIGKQKYKDLRAKIHHLTLPKEQKNEELLYHVSGWISYLNSVDKLRFNKAKKYISELTKKHPKTLIARLDK

SEQ ID NO: 621 - protein, 322 aa, synthetic construct
MAKNENIRLNMLGLPIIQTIDDFSQITHLSKYTLYQLSARSDFHYKKFPSKKKSGGTRTICQPSKNLKGLQAWILVNILNKLKVSDSCKGFEKGSSTADNARPHINANCMLTIDLSDFFGTVTDIQVYNVFKSIGYNKLISTMLTNICTCDNSLPQGSPCSPKLANLITWKLDKRIQGFVGKRGITYTRYADDLSFSGLHPANTVQILPVVKSIIEDEGFLINPKKTRVAGANRAKRITGLVISNNRFGVGTKKYKMVRSKIYHLTKLSEQKNTILLNEVTGWISYLNSVDKPRFRKALKYVEELKKKHPKTLVDKITGYNN

SEQ ID NO: 622 - protein, 355 aa, synthetic construct
MNNIKTKTNYFLLNTLGLPIIDSLDSLSDTLAISKNMIYLLSKCNYNYYVKTHIPKKDGTKREILIPNYSMKMTQRWILQNILYKIRVSDNAKGYKKGIKAPLVENAMMHHEQLYCLILDVENFFPSIGVKRICNLFERVGYNSLISYILARICTYKDYLPQGAVTSPYLANLVCFKLDRRIDAYCCKREISYTRYCDDLIFSSDNLDSLKKAYKMFEVILCNEGFKLNRRKTRFLTPNTLKQILGITINDELIKAPKIMKRKVKALIFKSIVNKDYRKNDVIRGYIAYIKSIENNYQNKIEKYVKRLHNKDFIRGDLEVVKAYNENKLYSNFPDLAFSKAAALFLENPELEELM

SEQ ID NO: 623 - protein, 338 aa, synthetic construct
MLYLEKLVESMEGKYETKYISLCAAYSEQLISKGMPVIFDGQHLAKLLGINFSILSYYVYSTNKFYQEFEIDKKSGGSRKIEAPSRNLKKIQRWILDNILNKFELNENTYGFRKGYNIVDNAKNHTNKFLVYNIDIKDFFPSITREDVFYIFYNKGYTYEVSYIFSKLLTYKNHLPHGAPTSPYIANLRCEKMDYSLNVYTKRINADYSRYADDITISTNNAHDFIDNIKIIKKIITNNGFVLNEKKERIQYYKSMQEVTGLIVNNGVKVRRRFKKDLEKEIYYCLKYGVSSHLTRTEKNHLSFYKEYLYGKVNFIKMVEPELAEFYLKQLSEINWYS

SEQ ID NO: 624 - protein, 471 aa, synthetic construct
MATDTLAWADVDAAGGIRAWVDAEVARQGLADPGATQSTSEAKSRGVGTPTASPAGRGSSPVEKMSDAELKLYKARRDEERRVRRELYRRAWQAYRRSHIVHLGPGVFWHDTADVDRFDADDPERKRQDNALPALADVEALAKALGLTIARLRWLAYHRDVDTGTHYHRWLVPKRDGTPRLISAPKPELKAAQRWIMREVTEHLPMHGAAHGFIPGRSIASNAVVHAGARVVVKLDIRGFYPTVTMRRVKGLLRRAGLGEQVATVMALLATESPREKVETHGKTHYVALGPRSLPQGAPTSPSITNALCLRLDCRLSGLARKLDCRYTRYADDLTFSWHGAARAQIGSLLRAVGKIVRAEGFEVHMKKTRVMRAGARQKVTGLIVNQAPPDRPAARVPRDTQRKLRAAIRNRELGRPGKGETLDQLKGMAAFVMMTDPARGRAFMERIERLIAAGTQGADGAPGTPERGSP

SEQ ID NO: 625 - protein, 511 aa, synthetic construct
MSDQTSTTEPAPSADTPSALASADGQPSGAEAWAEIDEAGGIRAWVQAELTRRGLIDDADTTSMSDKERKRYRARRDEERRVRRLLEARAWAAYRQAHLVHVGLGVFWHDTADYDRYDIAEPEVRRQDNDLPALADVQALARALALPIPRLRWLVYHREVDSGTHYHRWTVPKRSGGERLISAPKPTLKRAQTWIARNITEHLPVHGAAHGFLPGRSTATNAAAHAGAAVVVKLDLRDFYPSITLPRVKGVFRKAGYGEQVATALALLCTESPREEMVVHGRRYHVAVGSRSLPQGAPTSPSITNALSLKLDCRLDGLARKLGFRYTRYADDLTFSWHQDEDAPVGRLIRAVERITAEEGFAVHEKKTRIMRAGRRQKVTGLVVNRLPRRPSGQASDESRGQPSEEPLGHGASGQEPGVGAPRARVPRKLVRHLRAAIHNRAQGKPGQGETLAQLRGWAAYVHMTDPARGRAFLDQLDRLASAGVGDETGAGAGDEASAGTSDLPATGDKS

SEQ ID NO: 626 - protein, 633 aa, synthetic construct
MSDQARRAAIQARIAQSSRDDVILDEMIRLGFWDAGGDPHAAELTEIMARSKEIRSELSQLNSQNARYLDPEAALKAMHAERKAAALARRKETKLARARARQARAEAWAQRSRDAVWHLGPGVSAALEQGEGKSAPRSLAPGLPALATPAAVASAMGVSTGELRFLAYARPMSRVSHYKRFEITKKSGGKRVISAPMPRLKYAQYWLLDAVLSKLPLHPAAHGFVPGRSILTNARPHVGRDVVANMDLRDFFPTLDDRRVKGLFESLGYGEDVAQVLALIATEPVTDEIEIDGRVTHLARSPRRRLPQGAPCSPAITNLICRRLDARLAGLAAKLGFAYTRYADDLTFSASGEDAKKVGALLRAAQEIVRAEGFEPHPDKTRVMRRGARQEVTGLVVNDRLGAPREAVRRARAALHRAERQGVAGLKFGSGRDALAGLVGFAQFVAMIDPRQGASLVARARALRRGADEGATSMLSRAGLARAGLGAAALRKAAAAGAPPEAMRWRPAERPAPTLDPVLVEAERAAAAKARREAEKEGSRQAKSARSGTSVPPVRGAGTGASGGGGPARAVWGRTATPELGESSAEWARPATPRRSFWSLAVTGWLILMALAVLPFAPWLTALLGYLVYRRLR

SEQ ID NO: 627 - protein, 264 aa, synthetic construct
MPYNYDLCFKTPQNRWIFVPTSECRDNGYEYVKLIRRKWTLPNFYYHLKAGGHIAALKLHEGNNYFAKIDIKSFFPSISKAKVIRALKDIGINYKLAELIASWSTVKSKENSTKYIVPYGFVQSQIIASLCLDKSAIGSFIKNKLPTDVKVSVYVDDIILSSNNPSALQDIYNQIIATFDKTGFTVNTEKSHEVLDQTTTFNIVMNAEDMQITEDRFTDFESAITPLNIKRSEAIINYVSSVCSIQSETLKEQLKSMIDNSKCA

SEQ ID NO: 628 - protein, 296 aa, synthetic construct
MQWLRYYELSPGSQKYIYIPTDESRLIGSEIINVLKYRWKKPEYFYHFRQGGHLSAIKVHFYDEEPCQFSVFDLSGYYRQITRSKLVRVLKKYVGYEQALDWAQKSTVLQNGDLGRSIPLGFVQSGFLASLVLDNSCLGKTLREINKTPNIRISVFVDDIVISSQDHELLSFYSQKIKEASKKSNLTLQHRKTFCNIDSINIFNLSYKSGSEIDFCADRVNNFKEILVKNCDRKFVVFGVIMYMLKVNAKRTLSILDSIVQEKGISKTGILGKFYYEHKIKENQNIIETLRKVCFQ

SEQ ID NO: 629 - protein, 256 aa, synthetic construct
MSNYTPKWIHRITLENGKWIFVPSQSSRLSGKAIVKKVKLEWAPPKYFYHLRRGGHIAALNAHLENKYFSRLDIKNFFGSITASRITRTLKPYFGYNLSRDIAKQSTVRIPGLLERKLMLPFGFIQSAILASICLDKSSLGIFLKRIKRDKSLSLSVYMDDILISSNDQQRLIEVTAELKSYFSKSHWVSNTGKEVIAADSMTAFNIDMLQYEMRVSEEKMKQFAFNFSETENINKKKGIYSYVKTVNDGQLIDLV

SEQ ID NO: 630 - protein, 251 aa, synthetic construct
VTQKWTHRYQLKPGRWVFAPTDEAKKCGAHIKRSVASRWKAPNFYYHLRNGGHVAAVRSHELSRFFFRADLDDFFGRVNRSRVTRCLKPWFSYAEAREMASESVVKRPGETAFVLPYGFVQSPILASLALDKSKLGSLLRSLDGGRDFTVSVYVDDIIISGDDEAQLKEVASRLERVASEALFPLSSGKTQGPASGVTVFNIELSHRMLRITDDRLASLRLDYQATASEHCKAGIVSYVYSVNPDQVAQVT

SEQ ID NO: 631 - protein, 231 aa, synthetic construct
MQWSSYYELTPGSKKYIYIPTEQSRELGKLIIETIRKRWTPPAYFFHLRKGGHLAAIKHHIDKSCKPRKFSVFDISGYFGQVTENKLRRVLKNFVSFKEASQWAYDSTVRKPSEDRRTLPYGFLQSGDLASLVLDRSYLGCEFRKIHQNPNIKLSVFVDDIIASSSDPILLEEASNSIINAAKLSNFKFNQDKIRCNVDEIEIFNIHCSQDFGLSFSQEKLKKNSTNSKKL

SEQ ID NO: 632 - protein, 251 aa, synthetic construct
MPINFKFAYECKGKRIFVPNDECVRRGEALIKYCSQAVDFPSYFYHYRAGGHVAALHRHLEHRFFFRIDIENFFYSISRNRVSAVLHHIGFRKARPYAEWSCVKNPFGAPAYSLPIGFVQSPMLASLAILRSPVAAAIERAAAAGAFVSVYFDDFIGSAVDREPLEKAFQDILHSCQEANLISNQLKLAKPSEHILAFNCDLSHGIAEVAEARVAKFFKAPRSQWAEAAFREYCNRVARNNHKSEGRRFLR

SEQ ID NO: 633 - protein, 255 aa, synthetic construct
VKTYRKKIDLGEGKFAYEQTAESYKYGKMIIKKIKQKWAPPSYHFHYQKGGHLAALNAHRNSNCFSKIDLSKFYYKITKNKIIRNLKKIGFTFQEADEIAALSTIPHNGYFVLPFGFVQSSIIASLVLSKSAIGSVFKNTPDAIRLSVYVDDILVSALDKQVLVESFSQQICDAAEKSNFAINTAKTVLAQTDLEIFNIDICRNKWKISDNRMSEFMVEMSLTEDDNRAEAMIKYVSNVNLAQSESMRRMRDMRG

SEQ ID NO: 634 - protein, 257 aa, synthetic construct
VDRWINRFKLNHSIWVFVPSDDSRQVGRKIKTAIEKNYKFPEFYFHLKNGSHIKALNSHMQHEYFASLDIENFFGNINKSRITRVLKIFFSYDEAREYANWSVVRNPDENSNESILPFGFVQSPALASLCLDKSKLGRVLRNINNLDVSVSVYMDDIILSSNDKALLYKSLKKVEEASEKSKFPLNKDKKNNPSNKVTVFNIDLSRGKLQINNKRIKEFQSAYEKTGLDEEKKGILNYIKTINPIQEKQFIDKINKI

SEQ ID NO: 635 - protein, 251 aa, synthetic construct
MFSKRWDNKFLLKKDLWVYVPSDEMYAFGKKIHTTLSMRWKRPANYYHLLAGGHVAALKYHQSDSYFAKFDIKNFFNSISKTRITRSIKSLVGYSAAREIATVSTVPVSHQQSFSHCLPYGFVQSPILASICLSESYLGRLIERKCKSCKISVYMDDIVISGNSESDVDALLNELLSAASKSHFEVNPSKVRLTSHTLESFNIELSQQTLNITADRLDAFKQEILNTENQAKIDAIIGYVKTVNVSQAGSL

SEQ ID NO: 636 - protein, 254 aa, synthetic construct
MAFHELWDQKFELVPGKWVFIPSTESRIRGEYIASEIKRKWQAPFYFYHCRQGGHVEALKKHMASRYFCCIDIKSFFASINRSRVTRVLKKHFGYVIAREFSRDSVILLNENDSKKYILPFGFLQSPIIASICLDESALGRRLCKLASSYNFIVSVYVDDIILSCNDIDLLRKEFENIIIATNRSGWKISTEKTYAPSEQILAFNIQMSHGYLGILPERMNLFSTAYQKAESDHQKEGILRYIRSINPNQTVLL

SEQ ID NO: 637 - protein, 251 aa, synthetic construct
MPAKYSSKFQLKPEVWVFVPTLPSLKLGEEIKTLLEKRWKAPSYYFHLRKGGHVAALRSHFSHKYFLHLDIQNFFGSINKSRVTRNLKKFFPYLTARDFANHSTVVHPETKKTVLPFGFVQSPIIASLCLEQSALGSHLDKLHKTAEISVSVYVDDIVISADNEAAITAIKEQTIYAAEQSLFSLNEKKSEGPSLQITAFNIQLSNAMMNITPEKMREFKKTYGDSSSEDQRRGILGYISSVNYDQLSEVI

SEQ ID NO: 638 - protein, 256 aa, synthetic construct
VRNLFDHHFTLKPGTRVYIPTDEGRDRGREIKRRVEKAWKAPPNFFHLREGGHVAAARRHKDHPWVASLDLQRFYDQILRSRVHRSLKRIGFDHDDAFEMACDSVVDKKPPQREFSLPFGFVQSPLLASVVFHHSALGHAIRQLKRDGLTVTVYVDDVTLSGETEQAVLSGVQELETAAADSNFAFNEAKKQGPCDEVTAFNIRFGSGTFEIEEARMDAFKRAIEVGSDWSIDGILGYVGAVNQDQFEALVAGTGN

SEQ ID NO: 639 - protein, 251 aa, synthetic construct
MASLWSNRFETKKGRWVFVPTSECRAAGQVIRKQIASRWDPPRYLYQFRKGGHVSALQLHIANTYFARLDLANYFGSINKTRITRVLKSMAPYRDARQWAELSVVPDPDHPMHWMLPFGFVQSPIIAALSFSRSALGSSIERISTQPNLTVSCYVDDIIISSTNKALVEHAIEDVTTAVMRSAFRLNEEKCEGPTTAITAFNIHLSHRSLMITKERMERFKFTVNNPGSAAQICGIKTYIRSVNGMQIRNL

SEQ ID NO: 640 - protein, 256 aa, synthetic construct
MDSQPRWIHKYEFKPDRWIFIPTEQTIKVGTEIKNAVTTKWPTPSYYFHLRQGGHVAALRHHQADKYFACLDIEKFFNSINRSRLTRSLKQLFDYKTARDYTLLSAVRHPKRVPKTYVLPYGFVQSPVLASLCLRYSTLGNKIDQISRAGAQRISIYMDDIIISGNVESDLRHSMDEIKQAAEKSKFKLNSKKEQEPSIKITVFNVDMTSAYLAIEKQRYLELKCNYQSTTNQNVRHGIGTYVSTINKKQCTALDQ

SEQ ID NO: 641 - protein, 335 aa, synthetic construct
MRFISQTFRRIKMNHRYCRIIFAGYYTVKFLNELIDLLVKILTLFNYFLPKKQMSFPLWSHRYKSKKGKWIYIPTDECRIKGANIIRLLSTFWHSPSYFYHLQKGSHIAALKLHLYNGSDLRQIKNSRYFSYFDITNFFGSINKNKIIKATKCFVGYQMAKDIANASTVTNIGSSEKVLPFGFVQSPLIGSIVLDQSYLGRELSKLSKLHNLKLSVFVDDIIISSDNKKLIQSASERILKAIEKSNLHLNQEKSSICNGSMKVFNIFAKYNCLYLTEHRLTVFAEKLINNSSNYFVVEGIVNYMKMVSPHQSKRLIKEIVCEIGTSRAGFIAKIP

SEQ ID NO: 642 - protein, 265 aa, synthetic construct
MKIQNNNLWDNRFKIAKNGGETWIYVPSDSSRKLGLTIKKHISSNWDIPDYFYHFKSGGHIEAAKLHLNHCHFASIDLKQFFSSLSLSRVTRALKKFWPYEEARILAKYSVVKCLDNRTGQCTMIPFGFVQSPIIASLCLEQSHLGTVLNKIYEMQGIKVSVYVDDIIISGNNLELLEEQYRCLLGAVEKSGLQTSEYKNQEPSSEITVFNMKLKHQSLELKDELINKFHSKFQATDNSNIRDGILRYLVSVNPEQSKLFIENSK

SEQ ID NO: 643 - protein, 262 aa, synthetic construct
MFKSASWINRFEIRPCRWIYEPSQESRINGETLIKQLAVLWKSPDFYFHLRNGGHVQAVRIHLSNKYFAKLDLKDFYGSISRSRITRVLREFYPPDTARRLAKMSTLPHFGDGEHSHSLPYGFVQSPMLASICLAKSYLGSKLAEYRKSKEIRITLYMDDILISSCTEDSLMRCFEDLKDSVKKSKFNVNDDKSHGPQSHTIIFNIEVSQYQMNLTDERFRELHVAYEKSKSKSQRHGIGAYVGTVNKIQALELDKPTFEFP

SEQ ID NO: 644 - protein, 248 aa, synthetic construct
MPVQFQNYEFSYLRSGKPIFAPSDLGKRIGEDIKNQVEAAYSFDDFVFHLRHSGGHVAALHAHRDHKYFARVDIARFFYSIARNRVQRALAEIGILRARHYAKWSCVKNPYLDPTYALPYGFIQSPILSSLVLMQSAVGNYLRSISTGGQISVSVYMDDISLSSDNNDVLVEAFEKLKQNLGEANFGLNIAKERTPSSAMDVFNCDISRGKVGVQQQRVDLFYSQERSPLSIAGFEDYCERVIDGNAP

SEQ ID NO: 645 - protein, 255 aa, synthetic construct
MVPKWSSKFELKLGTGKWVFVPTEESKETGAKIKAAIQECWSPPSYYYHLRSGGHVEAVKSHLGHTTFLHVDIQDFFGSINRSRVTRNLKAKFSYEVAREIANASTVRHPDDKARYIIPYGFVQSQIVAALCLDQSRLGTYLDKLCKQKDVALSVYVDDIIVSCNDADQANAMLAGLIAAAESSGFTLNPDKQEGPAAEITAFNILVANDSMAIDGNRFAKFVEALAATSSEHQRAGILSYVKSVNVDQSDSLVA

SEQ ID NO: 646 - protein, 256 aa, synthetic construct
MPSHKRWNSKFQIKEGVWLFVPTEDTINNGLLIKKLIEANWRAPEHYFHLKSGGHIKALHTHLHNKYFIHLDIQNFFGQINKSRVTRSLKEHVPYEQARKIAVESTVRLPESTPVKFMLPFGFVQSPIIASVCLSKSALGRHLANLVKQENFAVSVYMDDILISSNNLEELNIQMDLIKTASEKSGLPLNEKKQEGPCVNVTAFNICISQGLLKLIPSKLQEFINTYSNSTNEHQRAGILNYVLSVNEDQASLVAL

SEQ ID NO: 647 - protein, 255 aa, synthetic construct
MAQKYISKFQLKPGVWVFVPTIANAAKGNEIKSLLESRWKLPKYFYHLRKGGHVEALKAHLNNNCFIHLDIQNFFGSINRTRVTRCLKDFFSYSVAREYANESTVMHPRERKTILPFGFVQSPILASICLEKSTLGIYLKRLSKNKKIVVSVYVDDIVLSTNDEALFNEITDSLKLAADKARLSLNDEKTEGPSDKITAFNIELSNKIINITDKRIDELKVAYLSADSEHQQKGILGYIASVNELQKNAILEALD

SEQ ID NO: 648 - protein, 262 aa, synthetic construct
MNLKKRWLSKFKIKNSSWVFVPNKYARNYGNNVKIKIDELWKKPDYYFHLRDGGHIEALKCHTNNYYFIHTDIKDFFCCINKSRLTRNLKKFFNYEKARQIANESTIQCPNSNFKKYILPFGFIQSPILASLCLHNSKLGIYLDKLNKLPNISVSVYMDDIIISNKVKSELDKILEDLISISEYSKFPLNKQKTEICSKITSFNIELSYKKLKITKKRMIEFLDDYKNGYKYQKIGILNYIFSVNKKQFEKFLTYLKANCLA

SEQ ID NO: 649 - protein, 251 aa, synthetic construct
MKNYFRKIPLGDGKFAYEQTPEARKEGENLVKQVFKRWDAPSFFFHMKAGGHVAALASHKKNCYFTKLDISRFYYNVTRAKLVRSLQKIGVPFEAAMYYAQISLVCDRGHRFLPYGFHQSPALSALVLDKSLAGRYLREAARKFTLSVYVDDIILSSRNSEALAKSSDQLVQALHGSNFSINESKSKICSASCISFNVLIQENSTEITDQRLDQFKRQISEVNGKESVVQGILQYVHSISPEQAKGLAREV

SEQ ID NO: 650 - protein, 252 aa, synthetic construct
MARSFEKFYEIKEGRFVFEPTTKARKIGEEILNDLFKIWSPPDHFYHLGKSKGHVEALRVYSKSRLFASIDIENFFGSVTRTKISRSLRAIGIDDKKGFSIAYDSVVDFGGTKTLPYDFIQSVALATLVMEFSALGSAIRQAIKSNVMITVYVDDIILSGEHAETLQHHFDEFVRTTNAAKFNISAKKCQNVSDKIEVFNCNLSKSHISTTPKRMAQFKVDYAHASDARRASIEKYITAVNKSQVAELGRLH

SEQ ID NO: 651 - protein, 244 aa, synthetic construct
MPIRFENFDYSFSLKGRPVFKPSERGREIGLQLKQEVEARVAFDTFYYHLQKGGHVSALHSHRPHRWFARVDIERFFYGIGRNRVAGALAEIEIPKAGYRAKWSTVRNPYENPRYSLPYGFVQSPILATLVLMRSNVGRFLRSLPPSITASVYMDDIAISGDDEAELIEAFEELCNVMHEANFVLNRDKLEAPAAAIELFNCDLLHEMTAVREERRALFFDEPHSPASEDAFLRYCDRVEAGNA

SEQ ID NO: 652 - protein, 260 aa, synthetic construct
MKIMEPRWDSKFELKPGKWVFVPNGDTIELGAKIKDELRQRWKAPAYYYHLRQGGHVAALKAHLGQTCFIHVDIENFFQRINRSRVTRVLKGMYSYAEARDIANLSTVRLPEDAQKRYILPYGFVQSTLLASICLRKSALGNYLKQLSATDGIEVSVYVDDIIISLNDEALAENIFADVKRMAEKSGFDLNQKKEQRPADKISAFNIELSQNSLHVLPDRWHAFLDAMREDGNPHRHQAILGYVDSVNPAQANQLQAEML

SEQ ID NO: 653 - protein, 257 aa, synthetic construct
MTIEVQRWEDKFEIKPGVWVYVPSVEARKVGGKILQAVRNKWIPPLYFYHLRTGGHLKAARLHLKSDFFAVVDIKQFFQSTSRSRITRDLKSYFTYSQAREISTFSTVRNLSHSPHKHVLPFGFVQSPILATLCLDKSYFGSLLRRLNKHHDLKLSVFMDDVIISSNDLAQLQAAYDEALVAMRKSGYQANMSKTQAPSSKISVFNLTLSKGVMKVTSQKMSDFLIDFYSSNYEPHRIGVKNYVEAVNPGQAKLFKL

SEQ ID NO: 654 - protein, 254 aa, synthetic construct
MYESSWSNRFEVKPNRWVYNPTNSCRSIGKGIQWKLRKRWTPPPYYYHLRDGGHVAAIEVHLENNFFATLDIKDFFGSISRTRVTRALKKFFPYIEARNFAKQSTVKVMRNYPFSHQLPYGFVQSPILASLCLFDSKLGRELHALHIKKKALVSIYMDDILISSSNKDELIKIYEKLKIDLVKSKFNLNESKSLSVSDSVTAFNIDFKNNDKKINYDRLVRFQYAYLLSNSKAQKRGIASYVGSINKTQAKTFI

SEQ ID NO: 655 - protein, 255 aa, synthetic construct
MPSSERWVSKFKIKPYSWVFIPNKETIQNGINVKKSLEAKWTPPLFYYHLRSGGHVKALKSHVKNNFFIHLDIQNFFSSINRSRVTRNLKVFYSYTDARNIAMDSTVRLPESIDKKYILPFGFVQSPLIASLCLQQSRLGNYLKELYSKKGISVSVYMDDIIISGNNLTNLTLILKKIKLVAEKSKFALNSDKEEGPAKMITAFNIELSHDLLKVSDTRFRVFFADYKMTENENKRNGILGYILSVNKEQASELK

SEQ ID NO: 656 - protein, 255 aa, synthetic construct
MQNSHKWLSRFRLKSNTWVFIPTLETVKEGKLLKKVIEFKWPPPPNYYHLRSGGHVDAVKYHMGGRFFVHADIKKFFNSINRSRITREQKPYFGYEKSRAIAMESTVSIPLDSGQVFALPFGFVQSTIIASLCLRKSSLGNTIEMLNKTDGVRVSVYVDDIIVSTQCLKKAETALLMIQKSAERSGFSLNKEKSQGPSDKITVFNIDLKQNLIEITSWRFNELLSSYKNASSDKQKSGIWGYVNSVNSAQASMLV

SEQ ID NO: 657 - protein, 259 aa, synthetic construct
MIPNFENRFQIESGKWIHEQADEYEVEARKILGRLFSKWRPWPLFYHLRSGGHVAASHAHVGNPLRVRLDIDNFFGSISRNRVVRALKRVGFSYEEADDFARKSTVPFNSGFVLPFGFVQSTALATLVLQKSPLGAALKNMRDRDFTVTVYVDDIIISGDVDPSEMEKEVDKLFREARRSRFSFSSSKIAGPEPSIRAFNLILSPDLVSVAEDRFSEFSEEVDTEGDTPKVRAILGYVKTVNQKQYDYLANLLTDAEGS

SEQ ID NO: 658 - protein, 251 aa, synthetic construct
MVHNYEYKFEIRPNKFVFVPTPQTRKNGKKIVREVMQIWTPEDYFYHFGKRGGHVAAMRPHVGNSFKASLDLTKFFMNVSRAKVVRALKRAGVSSSRSFDIAFSSCVEFKGRKFIPYGFPQSMLLATMAVENSALGSQIKTLKASGVYVTMYVDDIILSHNDKAVLCEAYGELVASANQSGFEVSSKKSSPPSVGVEAFNCNIDKDISIKHDRMAEFVSQICEGTPSTKEAVLRYVDVINSSQADELNLIT

SEQ ID NO: 659 - protein, 250 aa, synthetic construct
MKRWEHRFEVKPGRWVYVPTPIGKASGEVIRLAVSKVWSSPSFYFHLRGGGHVAALRRHTPHQYFFRCDFDDFFGRINESRLTRCLKRRFSYAEARQMARESVVIKPGSKKTMLPYGYVQSPILASLALDKSRVGRFLRQCDLSEHLTVSVYVDDIILSSNDDGLLGDAAAELQQLALDAGLPLSSEKTAGPASAITAFNVELSHGSMSLEHDRLQRFREAYAMASSPQVEAGILGYVHTINPAQVAAVP

SEQ ID NO: 660 - protein, 255 aa, synthetic construct
MNSIWLHRFEIKKDRWIYVPTNESLDYGNWVKNSLEGKWKAPSYFYHLHAGGHVKLVHDAKDYQYFSRYDFENFFAQVTQNRVCRCLKDHFSYDQAREIAIRSTVKQQHTRSVPYGFPQSMLLASIVLDHSRLGKYFNQLRRRGFFVGVYVDDLIIASNNQNELQKASTELERIAIQSNLVFSKSKVERALTKISPFNIDLAYSSLEITYSRYAKFVERIQAENDNFTKDAIKGYVQKINPKQADYLALLGKLDH

SEQ ID NO: 661 - protein, 257 aa, synthetic construct
MLENYDHRYTDDGGRLIFVPTDDGRLIGYDLIRRILKRWRPPAFCYHFQRGGHVAAAEAHLPNRLFVRMDIQRFYDAVSRNKVHRSLKSIGIKQRHAWEAARFATVSRSPSGRGRPYSLPFGFVQSPMLATVALMTSALGNAIAAVHAARAITVSVYMDDVLLSGECASVLANAKTFLEAAAAESGFTFNPEKGSGPTPSVTVFNLVIQHRSMVLTTDRFTDFEDDIRKSRNEDITNGILSYVGTVNVAQATALARL

SEQ ID NO: 662 - protein, 252 aa, synthetic construct
MPQKWDTRFQLKPGTWVFVPTDEARELGYVIKELVETRWRPPKNYFHLTNGGHVRAISSHVHNTTFAHLDIQDFFGHINASRVTRWLTPLAGYAKAREFAKASTVPYPNHGGTMLPFGFVQSPILASLCLFHSALGRCLAELPRKLGAVVSVYMDDIILSASDHSVLEQAVKMVEESAERSGLPLNPDKHEGPAAGITAFNIALAHQSLRINDERWNSFLTEFQASDNDSVRRGIHSYVHSVNVEQANNLGL

SEQ ID NO: 663 - protein, 256 aa, synthetic construct
MPTFYDHKFTSPTKPKRWIYVQTDDERAAATHLLAVLRKHWTPPKYFYHLRKGGHLSALQQHAHDIFFAVLDIEGFFGSITKNKIARALKNIGFAWQDAVTVAHRSCVQEGTKRILPFGYVQSPMLASIVLNKSALGSALEAVKKQGLNVSVFMDDIILSHPDNSDLVGDALTTLNEAADISHFHFSAEKSQAVAEKVHAFNIILSSESLEISPNRFEKFAQTVLQAGDGATRAGILGYVAQVNTAQYDQLAQLTH

SEQ ID NO: 664 - protein, 275 aa, synthetic construct
MPLAFENFLYSYKKNGKPIYAPNPFGEKLGAELKRKVNKAYKFDSFVYHFKDGSHVLALHQHRNNQFFCRIDISKFFYSVQRNRVKRALKDIHVQRPEYYAKWSTVKNPYGAGYVLPYGFVQSPILATLVLAKSSIGIYLRGLPTSVTVSVYMDDICLSGNDEAELQTAFEGLIVAVAEAGFALNHDKTRPPAAQIDIFNCSITTGQTEVLQDRIDEFFAEDRSAASEEGFKTYCNIVESMTWRTGHKKKRRRVYFRSLPKPAPVVAAAPVTQTI

SEQ ID NO: 665 - protein, 275 aa, synthetic construct
MSLTWVHRFERKPGRWVFEPSEEARKQGAEIKALIETHWKPPSFYFHLRQGGHVAALRAHLASTWFVKLDIADFFGSVSRSRIARLLKEFVPYRDALHMATSSTVRHPTEVSRLMLPYGFVQSPVIASLALAKSALGKYLRTLHSDQDLVVTVYMDDVIVSGVDEHRLADVAQKLDSLAKRSRFELNADKTHGPLAKLRAFNIDLADAAMVIAPNRLDQLKNVLEESTNGFQIEGIRSYVKSVNEEQAAELGDPLAGTDTEPHGASKDDLGKPPA

SEQ ID NO: 666 - protein, 235 aa, synthetic construct
VFVPTPAAAATGEWIKAQIEAHWTPPDYYYHLRSGGHVAALKSHMGHTNFLHLDVQDFFGSVNKTRVTRCLKTKVGYALAREWANASTVTHPKNKTRSIIPYGFVQSPIVAALCLAESALGVCLDKIRKTKGAVVSVYVDDIIVSSNDSSLCLSLLAMLKTAADRARFALNPDKEQGPASQVTAFNIVLSSSSMQIESARLQEFVEALAKATSQAQRKGILSYVSSVNADQGKAL

SEQ ID NO: 667 - protein, 253 aa, synthetic construct
VNPKWSSKSEIKPGRWVFVPTVEARDAGKALKKLIEDHWQPPAYYYHLRPGGHVEALRSHAGHTSFLRVDIQDFFGSINRTRVTRCLKPMFGYELAREWANASTVIHPDNKERSIIPFGFVQSQLVASLCLAESALGRCLEKLNKDPALSLSAYVDDIIVSSADAERCSAVLEELNIAAKRSRFTLHTAKQQGPATAISAFNILLSAEGLQVEAERLKAFEAALAEATSDAQRAGIIGYVSAVNAAQGESLGA

SEQ ID NO: 668 - protein, 250 aa, synthetic construct
MPAKWLNRFELKPGRWVYVPAPDARASGTAIKVEVERLWSPPDYFYHLQSGGHVAALRSHLGSSIFFKADVQNFFGSINRTRVTRCLKSKFSYKVAREWAVASTVQDPGSTNMTLPYGFVQSQLLASLCLSESALGRVLHRISRKDGAAVSVYVDDIVVSTRDAALLEKLHADVVLAADRSRFTLNPAKSTAPSPQISAFNILVSEAQMSIEPTRLAQFASALARGATPSQKQGILNYVNSVCPAQLGTL

SEQ ID NO: 669 - protein, 258 aa, synthetic construct
MWFETPWIHKFEVKPGSWIYVPSALTRNRGEKISQQVKNVWDAPDYFYHLNQGGHVKALKSHSNDNYFASIDISDFFGSISRSRITRALKRKLGYEKAREIAVASTVKHHILGQHSHSLPFGFVQSPILASVCLDSSALGERIKTCSTNKSLNISVYMDDIVISSDSKEELLTEFGLLKDAAKSSHFSLSIVKESLPSTSVVAFNIELSHRLLKITDGRYSQFIQAYRATQSIFEREGIVSYVRTVNYAQAKSLECTK

SEQ ID NO: 670 - protein, 264 aa, synthetic construct
MTLPWKDRFEVKPGRWVYIPTQETLEKGRQIKALVASKFQAPSFYYHLHEGGHVAAIQSHIDDRYFLNVDIKNFFGVINRSRITRSLKKRFPYAQAREITVQSTVRVVGESRYEYHLPYGYPQSTILASICLVDSALGRYLNSLSNQCNVSVYVDDIIISGNDPDELQQISDTLAEKSEVSRLFFGRQKAHQVSETITAFNIELSQHKTKITHQRYSQLLQQALLADNESVINGVLGYVRSVNREQHIEMHKELFTLGHIKAPA

SEQ ID NO: 671 - protein, 255 aa, synthetic construct
MPSLWKNKFEIKPGYWVFEPSEECRVIGNELKNIILGKWQPPDYYFHFQYGGHVAAAKSHFGNIFFLKLDLSKFFYSINRSRITRNLKEFFEYSTARDYAKSSTVRDPNNKYKFFLPYGYVQSLCLASLALSKSQLGTELNKIRKNNGCTISVYVDDLIISSNNIELLYKIKDVVIDSAKKSKFLINENKTEGPSTLITAFNFDISYNSVKINETRFYELLENHKKSDLMTQKEGIEGYVRSVDLNQYQFFMSLI

SEQ ID NO: 672 - protein, 258 aa, synthetic construct
MLPNYEHAFKNSNGKWIFVPTDESREQGYAILKEIHDYWEAPKYFYHLQTGGHVAALKAHQNKKFYVRADIKRFFSSISRNRIVSSLKKTGLFYKRSKEIADTSTVMSKETPHKKVLPFGFVQSPILASIALDHSAVGKFLRSDIVGVTRTVYADDFLYSSDDKEILQKTYLDLQKSISQSGFAINNGKSHAPQEQTCIFNVDITKNSLKISDSRYQEFTDEMFGMNRLRSEAIAHYVRTINLEQSNKLLSLFKNGSG

SEQ ID NO: 673 - protein, 245 aa, synthetic construct
MAVAIPNFEYSYRRKGKPVFVPTVIGRRIGKEVKSEVESAYNFDPIYYHLRCGGHVAAMHHHRDSLLFARIDISRFFYSISRRRVQSALDRVGIANARFYAKWSTVANPYGNPKYALPYGFVQSPILASLTIATSQVGDHLLGLPAAVSASVYMDDISLSSDDRGELERAYSATLAVLEADGFQVSADKLRAPAAAIDIFNCDLSHGRANVRDQRIAEFYGRGPDQISEEAFVAYCASVEDGNRP

SEQ ID NO: 674 - protein, 558 aa, synthetic construct
MNIEEVQRRLWEQSRAHRQQRESGSPLFPANPYDDRIRKLMDLMHNPTWIAAACDRVLKRSRGKAVGVDGVRVRDFERSCEHRLEELRLELKRGTYQPLPLRRVEIPKANGKMRRLGIACLRDKIVQEAIRMALEPIFEAEFHRNSYGFRPNRSAHHAIAQCRNAALAGYAWTIEGDVKACFDEIAHKAILRCVREKVMDNKFLNLIDRLLKAGVEIDGVVHPTTKGVPQGGVASPLLANAVLNKLDWFLQSKGFYDAAKRRRSSHSLPNIRFCRYADDWCVFVTRCDRQYAERLKDEIRDFLRETCGLELSAEKTRITHVRDGYDFLGFNISVGVGQSGKMVPKVKVGRKAIANIQRRLGESLRYRPMQESISVRLVRTSAVIRGWSNYFKAAHNFSRVAHGLDHKAFWITAKAICRKEDISTAKCFRRYRLGNKIGVHEACTLARFQETASSYYYAAPKPYQPGCNRYLDDHEWEAALVLSEHARPGSGDLKWKALVRDGFHCRGCAVVVSARTSHADHIRPVNSFANLELANDLDNIQTLCRWCHKQKSARELCA

SEQ ID NO: 675 - protein, 564 aa, synthetic construct
MYPTKMAEKQAKLAETALSNPEHRFHNLYDLMHWRYWIEEAAAKVLARPGSSTAGVDGKTRVDFEKNYATEISRIVTELKDKTYAPQPVRRMHIPKGNGKTRPLGIPILRDRIVQEALRAILDPIYESDFQHHSYGFRKGRCTMDAVAVLMPLFNTQVKHYWVIEGDIKSYFDNVHHRKLMKLLRQRIADKALLDLIWKFLKAGVMEGRLFACTETGVPQGGVISPLLANVYLNEFDKWAERQWHNLTPYDRQRRRQAGLGNYTMVRYADDFVIVSNGTRAEVERTKEAVRRFLAEELHLELSAEKTLITHVNDGFDFLGFHIQRCKPEGRWVVHLRPTEKNKQRIKHRMKELTSRNWTWMDEYTRLTALNRIVKGWCMYYRYTSLHSDLEEITRYIWFRYLQWLLRKHKGSRKHQLIQEKTAVIHNRTRWTATVAQDGQAITAHQWLPTPKELKRERYRLKGRGGFAHPYLEPALDTTDNPEWEGGPAEVLFTEVIGARSRRGEPLEMAELKLRRKLRDRFTCQHCGSREHLQVHHVGPVTSTSIDDLITLCLKCHQQQHRQN

SEQ ID NO: 676 - protein, 509 aa, synthetic construct
MIISEMQHKLATWAESDPNRRFDRLLRLIANKEWLAEAARMVLASSGARTPGIDGMDKQRLQVKLDQHLDDLRASLLEESYRPQPVKRIYIPKSNGKLRPLGIPTLTDRIVQRAMLMAMEPIWESDFHRLSYGFRPERSVHHAVRTVRIQLQDGADTTRGRWIIEGDLASYFDTVHHRLLLKCVRRRVQDGRFVDLLYRFLKAGHIDRGLFTASSEGVPQGGVLSPLLSNIMLHEFDMWLEAKYLNKKARKDRWAWNFGIQQGRPITVRENRQWKPAVAYCRYADDFVVIVKGTRAQAEEIREECRAFLEGKLKLTLNMEKTHVTHVDDGFVFLGHRIIRKRGAHGRMSIVTTIPKEKAKGFVRRLTETLSGNHSVSTVDMIAGLNRQLVGWAAFYKFTDFTAYVFRRIDHVVFWKLAHWLGHKYRSRIKPLMRKWFRVPEPGKAKTWLVFGRNERGDPVGKALHRLVSSPKAQFRWRNPEENPYIFRLEDRSTVTSHYHDVAMAMGQA

SEQ ID NO: 677 - protein, 507 aa, synthetic construct
MQNKLATWATESKERKFDRLLRLIANRAWLSEAASITLASSGARTPGVDGINKHKMEEMLDLELGNLRYELLTGTYCPRPARRVYIPKANGKLRPLGIPCLRDRIVQRAMVMVMEPIWESDFHPQSYGFRPARSVHHAIRTIKMQLQDGNERTDATAGRWVVEGDLASYFDTVHHRLLMKSIRKRISDRRFLTLLWRIIKAGCVDRGLFRASSEGVPQGGVISPLLSNIMLHEFDQWMEAKFLSKKVRKDRWAWNFGIQNERPIAIRENRQWKPAISYCRYADDFVVVVKGTKAHADEVRETCRAFLEDRLKLTLNMDKTHITHVNDGFIFLGHRIIRKRGAKGRMRPVSSIPWDKYRRFTERVVKQLSGNFSMNTMDLVESLNRQLVGWANFYQYTDHTVTIYGKVDRTVFWKLGYWLARKYKRGFRSLMRDYVRSPEKGKAKIWVLQGQNSRGFYGELALKRLVTSHKGWFTWRTPAENPYTLRSEKPRTIQSYYDDVAFALSNA

SEQ ID NO: 678 - protein, 507 aa, synthetic construct
MIISELQRKLATWTACDKTRRVNRLLRLISHHEWLYQAAQITLSSKGAKTPGVDGITKIHLQTNLHTYLAQISDDLRSGHYQPMPARRIYIPKANGKQRPLGIPTLRDRIVQRAMLMAMEPIWENNFHSLSYGFRPERSVHHAIRTVKLQLTDGRTSRGRWVVEGDLSSCFDTVHHQLLMKCVRKRISCQRFNHLLWQFIKAGHIERNLFCATTEGVPQGGVISPILSNIMLNEFDQYLNECYLGKKVRKDRCNWNSSITDKRPIASKENRQWKPAVSYCRYADDFLVIVKGNKQQAEAIRDQCRDFLEGKLKLTLNMEKTHITHINDGFVFLGHRLIRKRGVKSNMRVVTGIPLGKAKAFSHSLSQALSGDHSCSKIDKVEQLSRKLKGWAQFYRHTDFTSKVYNKIDRIVFWKLAKWLASKYRCSIKSLMIKWIKRPKANKAKTWVLFGKSNRGNLCEVSLFRLVSSPKLPFRWRLPELNPYLRDEIRKTVTSSYRDVAMAVSHN

SEQ ID NO: 679 - protein, 618 aa, synthetic construct
MTKQKKLRHLEYYDLQERFDELFAKSKQGELFTNLMELISSEENIKLAYRNIKRNEGSNTSGVDGKTIKDIERVSADKLVEVIQNKFRFYKPKPVRRKEIPKPNGKTRPLGIPTIEDRLVQQCILQVLEPICEAKFHERNNGFRPNRSAEHALAQCYRMIQIQHLHFVVDIDIKGFFDNVNHSKLIRQIWSMGIRDKKLICVIKQMLKAPIIMPDGTTIKPDKGTPQGGILSPLLANIALNELDWWISSQWETMPTHTQYKPHISKNGTISCANKFRVLQESKLKEMYIVRYADDFKIFCRKRSDADKIFVAVKKWLKERLKLEISEEKSRVVNLKKKCSEFLGFELKAVRKAKKYVVQSHISEKSKKRVTETLHKKIVEIEHSKNAKELGIHVRQYNTVVFGIHNYYRVATHISCDCSAIYNTIRKAIYNRLRGQLKSKGVIHSAFIQKNYGKSKMICFLGDAPLIPFSYVQTKTPRYKKVKICKYTPEGRSEIHKCLKFDESVIAVLHMLAKSHMNGRSVEYMDNRVSLYAAQYGKCAVTGKVLWIDEIHCHHKKPVSQGGTDEYKNLIIVHVNAHRLIHATNPETIMVYLNKLNLTKPQLKKLNKLRTMAGNPAI

SEQ ID NO: 680 - protein, 632 aa, synthetic construct
MTSRNKKRRKLRNAEYYDIQSLLDKLYADSKNGKVFTNLVELICLPRNVELAYRNLKKNSGSKTAGVDDKTIDDLAGLTNEQITDYVRTRLNYYKPHRVRRIEIPKKNGKMRPLGIPTIYDRLIQQCILQILEPICEAKFYPHSYGFRPNKCCEHAMARAYKLAQNHKLHHVVEVDIKGFFDNVNHGKLLKQMWTLGLRDKKLICIISQMLKAEIAGIGVPTKGTPQGGILSPLLANIVLNELDWWIASQWETFPTRHQYRSDVVREGKPGINHGHRYRAQRESNLKECYIVRYADDFKIFCRNKVDAERIFQATTQWLKERLFLEISPEKSHIVNLRKGYSEFLGIRFKLVAKGKEKDGKPKFVIRSHICDSAVEKIAEKMYVEISNLAHCADNRQLHVVVDNINLYVLGIHQYYQMATHIVTDLNPINRSVLSRLEHKKNLKCLLTEQGNAKLPKYVVQKYSASKCVRYIKGRALIPIGYVQTKPPMFSISGVCKYTAEGRSLIHNNLQTINISTLHYLMNHPNKNRSIEYNDNRLALFCAQNGKCAITGKVLEIGDIHCHHIVPIHAGGTDKYQNLKIVCVDIHKLIHAVDERTIRGLLEKLELTAYQIKRLNYLRKMAGNQELQTKAA

SEQ ID NO: 681 - protein, 645 aa, synthetic construct
MKLSIPKSEEEFQKLKDKLFEETKTALSQNKTPIFKNILEVAQCDVVILTAIHKLKGNKGSNTAGVDGETMRMDILNKDFNKVMKEVKLQFTHYTPDKVRRVHIPKSNGETRPLGIPTIADRVVQECIRSVIEPICEAQFFEHSYGFRPWRSTENALGRITDVVQKTGYHWIIEGDISKFFDKVNHTKLIRILWSFGIQDRRILMMIKAMLQAGIMEEINKNELGTPQGGIISPLLANVYLTPFDNFVTREYENKKLRKNYSSGQRSLILRGLSGKPRIKPIPCYLIRYADDWVVITNSKKNAEKLVYKYEKYLRETLKLELSASKTKITNVRSKAIEFLGYKYKQVRGKATKGYISRTKPIEEQLDKKITELLKDIKRLKKCKDTETLISDINIINSKIRGLVNYYQVTTWGSESMKKYNQRVRWAAFRAIRRRIGAKSAKGKNKKVDWVRANLCANLVGIHSNYTTALPSLKYKEHIVGVTDLAFIKFRQPVLLNQKETPFTQEGRERHLARTRKRPPQYRLDFIFGADATTTKRLLASRKRKNRLYNFEFYLNRAYAFNRDKGKCRICGKEIAPHEIQTHHVDPSLKTELVNKVSNLASLHDTCHNNMHNLTLTEQLLQAKGYTNTAVKKILNFRNKLAITL

SEQ ID NO: 682 - protein, 606 aa, synthetic construct
MTLNTKGKRAEYHDILPLQNELWENDTPKNLYKLITSKRNIICAYDCLRRNTGSHAKGVDGLNIEDINHVSLDRLIKTVRAKLLDYKPDPVKRVYIEKDNGKFRPLGIPTIWDRLIQQCIKQIIEPICEKQFAHNSYGFRPKRSQENALADVMKSLNLSKHRYIVNVDIKGFFDNVNHKILINQLWSIGIKDKSVLQIIKKMLKAKILEPNGKLMTPSKGTPQGGILSPLLSNVVLNDLDHWVNDQWIECGIETPSITIHWNKNGSPGGDKYRHLRKFSTLKEGRLVRYADDFVITCKTYNEAVRWSHAVTNYLKRRLKLEVEDSKSKIINLRKKYSDFLGFKFKLKKKRNKWVAESRISDKKKKKILASYRQQIRNTWSGAEIYKLNTKTFGLWEYFENATAVSVDMSEIAWRLSKIIYNHFSMNGEFRYLTEAELKSTGVGIKMTKLQNHCKVWVQHGVPVMPLSMGKTRYPLCKRRQEKPYEFTREKKDWQSYIILIESNITSSTLFHINKVSKYAQQKGKCAILKQFTGLDFHCHHIIPRYLGGDDSYENLIVLDRRVHNLIHARYDWKIKEMIKELNLNKQQIAKINKLRNQCKLNEIEID

SEQ ID NO: 683 - protein, 636 aa, synthetic construct
MAKRIVNKAERNAERYDAKEMGYQLYEDSLNGRVFDRLMPMIISEQNIILAYRNICKNNGSKTPGTDGKTIVEIQELPIEMVIKTIRNKLNYYQPKKVRRVEIPKDNGKTRPLGIPSIWDRLIQQCVLQVLEPICEAKFHERNNGFRPYRSTQNAIAQCYKMAQLQNLHFVVDVDITGFFDNIDHSKLIRQLWGLGIQDRKLIMIIKQMLKADILFNDIVITPETGTPQGGILSPLLANVVLNELDWWVANQWEMFKIKEGSTGYEFAKVDKEGNVLTVDRTQKWNKLRAKTELKEMYIVRYADDFKIFCRDYVTATKVMYATKLWLEENLHLQTSDEKSGITNLRKNYTTFLGIKFKVVPKGNKWIIRSHMADKSKAKVISKLSSVWKDIKNPSKQSELDKNINLYNAMVMGMHNYYCMATLVSADFAEIAFKVTGKSNGMNHNRWCFPIEKQGEITSKYILEKYGKSKQFRWINGRMIVPIGYVAYEYPKYKRREVNKYVRKYSDAENCISFEVMKYMMENAHLYPTLEMADNALSRYIAQKGKCAVTHNALTVVDMVCEHIKPCKGERNDTYRNLIILSKEVSDLVGAENSNKIDKILKNLLLTKEMQDKINKLREHRELEPIQFDDYIGTKK

SEQ ID NO: 684 - protein, 424 aa, synthetic construct
MDGSKLKVKSFEIPKRLVYEAWEKVRANKGAPGVDAVSINQFAAAEADNLYKLWNRMSSGSYMPGAVRAVEIPKDHGLGVRTLGVANTADRVAQTAAAMLLEERLEPIFHPDSYGYRPGRSAHDALAVARKRCWSQDWVIDLDIRAFFDSVPHDLLLKAVAHHTEERWVLLYIERWLKAPMQMPDGTLVARERGTPQGSPISPLLANLFMHYAFDRWMARDHPGCPFERYADDIVAHCDSKEQACSLLAAIAERLGAVGLELHPDKTKIVFCKDANRPGTSEHTSFDFLGYTFRGRLAPGPRGYFVSFSPAMSTKAKKAVGQKVRAWHLNRRTGTDLSGLAEDINPHVRGWINYYGAFYRSELHSLARRIDEHLVRWAMHKFKRLRGKPSRAWDWVAAARQRQPKLFAHWHLVSSTRGRLVGAV

SEQ ID NO: 685 - protein, 413 aa, synthetic construct
MAKSFNLSKFAVWDAYLAVKANKGSAGIDGQTMEDFESDLKCNLYKIWNRLSSGSYFLPPVRRVEIPKSNGTLRPLGIPTISDRIAQMVIKKRLEPLVEPHFHDDSYGYRPNKSALDAIAQTRRRCWRDDWVLDMDIQGFFDALDHKLVMIAVSRFTQCKWTMLYIERWLKADVVMPNGERVKRTQGTPQGGVVSPLIANIFLHLGFDSWMQKEFPCIHFERYADDIVVHCRSQKQLEYIGQMIKSRFAQCKLSLCQEKTKIVYCKDSKRLGTYSSQSFDFLGYTFRPRSCRDKEGKFFVSFTPAVSRKSMKAIRLKIKEHPMVKGCFSQGISELARAINPMIQGWINYYGHFRKSEMSTIYDYINEKIMKWAMRKFKHLQRRKKRAGQWLRKLYSKAPLLFAHWRIWKWVAE

SEQ ID NO: 686 - protein, 434 aa, synthetic construct
MSTELERISKLAGENRQLKFLSIAHLLTPEALMEAFKSLRKDASAGVDGVAYGEYRMEAGRRIQELYERVRGKRYRAQPLRRIYIPKEGGKQRPISIPTVADRIAQTVVTMVLEPEVEPRFHPDSYGYRPGRSALDAVGKARERCWRYDWVIDLDIKAFFDSLDWDLVERAVAHHTELAWVRLYIARWLRAPVQKPDGTVELRTKGTPQGGVASPLLSNLFLHYAFDMWMQRSFPSVPFERYADDAIVHCGSERQAKMVLSAIRDRFAECGLELHPTKTRIVYCQDSDRLGKYEHVSFDFLGYTFQPRRAKNHRGKFFVSFLPAISTKAAKAIRATIREWRLASTRNNQSLEDLAQLINPVVRGWMNYYGRYYRSKCVQVLRHVNLALAAWARRKYRRFKRRERESLHWLGRIARRDPNLFVLWRLGIRPEAGS

SEQ ID NO: 687 - protein, 415 aa, synthetic construct
MNEAKPFVVEKRVVMESWLQVKANRGSAGIDGIDLKSYESNLQKNLYKLWNRMSSGSYFPKAVKLVEIPKPNGGKRPLGIPTVEDRVAQMVVVMYIAPRLEAIFHDDSYGYRPMRSAHSAIAKAIERCNENLWVLDMDISKFFDTIDRGLLMKAVQKHVSEKWILLYIERWLKVPYQTSDGGVVDRMMGVPQGSVIGPVLANLFLTYVFDLWMKHYFPTIPFERYADDTICHCRTEKQTQYLKACLVKRFADCGLKLNEEKTKIVYCKDSNRKGNSEHTSFDFLGYTFRPRKAKNSKTGQIFTAFSPAISKKSMMKIKTEIRSWHLNRQTHLSIEQIAERINPIVSGWMNYYTRFGKSEFWKVMSYLNERLSRWVKRKYKRFRTKLSKAYDWLVECAAHNRHMFSHWMSGYIPHS

SEQ ID NO: 688 - protein, 416 aa, synthetic construct
MIQTKSQDITKRQVWEAYKKVKRNKGSAGVDGVDFETFEANLENNLYKLWNRLSSGSYMPPAVLRVEIPKSDGGVRVLGIPTIADRVAQMVVKDYLEPKLEKIFHNDSYGYRPKKSAHQALETTRKRCWQYPFVLDLDIKGFFDNIDHELMIKALELHMDTKWEMLYIKRWLVAPVQTKEGLQQRERGTPQGGVISPLLANLFLHYAFDVWMRKNYPTIPFERYADDAVCHCRSQREAQQLKADLSQRMEACKLELHPDKTKVVYCKDDKRRGEYENVSFDFLGFTFQPRVAKNSKTGEFFVGFNPAISTKAAKRIRLVMRRWKVQLMSHLSLEELSDRLSRVIRGWVNYYSIFARHKLLDVMRYFDRRLERWAKRKFKSLKRRQGRAHKWLMRIARKEPNLFPHWQMKYAKLTVR

SEQ ID NO: 689 - protein, 410 aa, synthetic construct
MHDISKEEPFRAWERVKKAGGGAGYDGKKIQDVQLDLDNQLYKTWNRLSSGSYMAAPVLLVEIPKAGGGKRTLGIPTVMDRVAQMVIKDRLEQILEPKFHKDSYAYRPDKSAIDAVGKARERCFQRKWVIDLDIKGFFDNIDHSMMMEFLLQHTKDKTIVMYVQRFLTAKAIKDDGTTVERTKGTPQGGVISPLLANLYLHEAFDMWMKEHLPNVQFERYADDVIAHCATEKQAQDVLEEIRERLLLYKLELHPEKTKIIYVGSGKDPENKPPRKFTFLGYEFKPRGYVKDKIWHMTFTPSIGAKALKAIQIKMDEWSLHSRTFSKLSDISQEKSAIIRGWIEYYGHYRRSELYKLAIRIDWKLVRWLKRKHKSLRSTDKAWQALRSVKKGWPKLFPHWHMIPTPPTRAV

SEQ ID NO: 690 - protein, 409 aa, synthetic construct
MIDYYETKQHPVTKKMVLDAYKKVRENKGSAGMDEQTLEDFKLKASTNLYQIWNRMTSGSYYPNAIKQVLIPKKSGGTRSLGVPTVSDRIAQQVVKSYLEAKVEASFHQDSYGYRPNKSAHQALDVAKGRCSYYSWVLDIDIKGFFDNIDHELMLKALKRYTQEKWILNYVERWLKVGVFNGNEVESREKGTPQGGVISPLLANIFLHFAFDMWMLKIYPHVPFERYCDDVIIHCSGKEQALLMKMAIAKRMKECKLELNEQKTQIVYCRNQIHKEKYEQVSFDFLGYTFRPRYCPTKKGLSLLFTPCMSTHSKNDVREKIRKVINRSFKGSVQQLAQMLNQKVRGWFQYYCQYNKYTTVGLWYWLNAKVINWVMENRHFGMRRAVRWLKTIYSTNPDMFIHWQLSHPW

SEQ ID NO: 691 - protein, 417 aa, synthetic construct
MIFKEQTKSVPITKEMVWESYKKVKSNGGSAGIDQQSLSEFDRVRSKELYKLWNRLASGSYFAPAIKRVTIPKAGGKTRPLGIPTVSDRIAQQVVKTYLEPRLESVFVDNSYGYRPNKNAHTAIQSVQQNVRRYSWVIDLDIQEFFENVNHELLLKALERHVSEKWVLLYIKRWLEAPVILEDGAVKVSTGKGTPQGGVISPLLANLYMHYCVDKWLEKFHPSVIMVRYADDLIIHCSSYQEAVRTLTDLKDRLEKCGLRAHPEKTKIVYCKKEGRNLNDYPVQFDFLGFSFQPMRNRLRNGGSFLQFDCKMSRKSKVRINGELRKLNFHNKTQRGIQDLAILLNPKIRGWVQYYGKISRRSLKPVFYYLHHRLIRWILNKYKSFKGSKVKAVKWLRQVTVSYPNLFYHWELGYKLV

SEQ ID NO: 692 - protein, 414 aa, synthetic construct
MTGKSYDIPKTLVWEAWLRVKANRGAAGIDAETIERFETKLAANLYELWNRMSAGSYFPPPVKAVPIPKKSGGVRVLGVPTVSDRIAQTAVKMWLEPRLDPLFHEDSYGYRPGKSALEAIAVTRRRCWDRDWVVEFDIKGLFDNLDHGLLMKALRKHCEEPWILLYVERWLTAPMQSADGRVQTRFKGTPQGGVVSPLLANLFLHYAFDTWVARHLPGVRFARYADDAVLHCKSRRQAEYVLDRIRERFPACKLELHPGKTRIVYCKDVNRTEDNPDIQFTFLGYTFRPRRAADKYGRIYVNFSPAVSRDALKAMRQTIRGWRVQLKNDKSLADLSAMFGPILRGWRQYYGRFHGSALESVWRRMNRALIGWLMRKHKKLARRKLRAAETLERMAKRQPRAFVHWSMGYLSSVG

SEQ ID NO: 693 - protein, 492 aa, synthetic construct
MMHGLEKSDLAVVAMKPANNAGSPAAEWVEPRAGTNGNADPPRTRRTQSRDSVSQGLERVRQAAMQRKRQAFTALLHHVNVDALREAFLALKRRAAPGVDGMTWQDYESGLEEHLQDLHARVHRGTYRALPVRRRFIPKPDGRQRPLGIAALEDKIIQRAVVTVLNAIYEEDFLGFSYGFRPGRGQHDALDALCVAIKGKRVNWVLDADIKGFFDAVDHSWLLRFVRHRVGDERITRLVGKWLMAGVLEDGHWSASDQGTPQGAVISPLLANVDLHYVFDLWAQQWRRREVKGDMIIVRYADDLVVGFEHEAEARRFWDAMRVRLEQFSLELHGEKTRLLEFGRYAIERRQRSGQGKPQTFNFLGFTFICGRSRRGAFLLRRHTRRDRMRAALRELKDEMRRRRHDSLTDQGRWLRSVVAGYFAYHAVPTNAHAIGAYRHHVIDLWRRSLRRRSQKDRMTRARMDRLAAEWLPPPHVLHPWPEDRFAVKHPR

SEQ ID NO: 694 - protein, 515 aa, synthetic construct
MQTALWESDQPIVPKKRGNARGGKELAGARWTGGEPPPIPRDGHGVSPKLRSITLRAREDPTCKFTSLAHLLTADFLTECFRELKKNKAPGIDGVTVREYEAKLDENISDLVARLKAKQYRPQPVKRVYIPKPNGERRPLGIPAIEDKIVQMALKKILEAIFEVDFCEVSYGFRPNRSCHDALDMVDTTIMTQPVNYVVDMDIAKFFDTVDHECLMECLRQRIADPSLLRIIARFLKSGVMEDGVFQEIDRGTPQGGILSPMLANIYLHYALDLWFEQEVKKQLSGFAQLVRYADDFVVCFQYRSDAEAFGAALRERLAKFELKISEEKSRIIAFGRSACQQARKQGKKCATFDFLGFTLYCDKDRNGNFKVGRKTASKKFRQKTKEMNQWLKGTRNRVKLGLWWPLLGRKLVGHYQYYGISGNIKGLQSYYHHTVRLAFKWINRRSQKKSYNWSQFNKFLARNPLPKPKIYHFYALSKRRGCAPEEPDEGKLHVRFCEGAHSHLGASTPTRGRL

SEQ ID NO: 695 - protein, 448 aa, synthetic construct
MQPVKETSTGHVGSGKCWQTSLRGIAKKATENKTHQFGNLYQLLNKESLREAFYDLKKKAAAGVDKITAEEYAKELESNLGELEEQLKSKQYRAKLVRRVYIDKGNGKKRPLGIPAVSDKITQRVAARMLEAIYETEFSAHSYGYRPHTGAQKAVKDLTKELICGKYGYVVEADIRSFFDAIDHDWLIRMLEVRIADKAFLRLIKKWLKAGVLDTDGMVKHPVTGCPQGGVISPILANIYLHYALDLWFEKRVQQSCEGMTYICRYADDFVCAFQFKQEAVKFYKELGERLEKFGLELAQEKTNIIIFSRFRQEDKTKFEFLGFEFRWGVSRKGKAIIKRRTAPGKLRKSIIAFTEWCKKMRSKRLRKLFPKLIAKLRGYTNYYGLIGNFRSLSKFYEHVKRIFYKWLNRRSQRRSFNLAEFDACWERYGVPKPRIVESDLVQLHFDF

SEQ ID NO: 696 - protein, 439 aa, synthetic construct
MSGSPNLGSISTRLRRIAQLAREDPERSFMSLAHYIDEYWLQEAYSRTRKDGATGVDGTTGKQYGEQLGDNLRSLLDRFKSGQYQAPPVKRVHIPKGTGDQTRPIGIPTFEDKVLQRAVAMLLEAIYEEDFLACSYGFRPGRSAHEALRDLWRELMGMGGGWVLEVDIRSFFDELDHGHLRGFLDRRVRDGVIRRAIGKWLQAGVLEEGHMRHPVTGTPQGGVISPLLANIYLHEVVDRWFEEEVKPRLGGRAVLIRYADDLVIALAEEKDARRVEEVLPKRLARFGLQLHPDKTRLVRFQAPRDEEKPPRSEGPGAFTFLGFTHYWGKSRKGNWVVKRKTAASRFTRSLSRVRQWCRRCRHEPVAWQQRQLSRSLRGHYAYYGITGNFRSLTNFHRQVTREWRKWLNRRSQKARMIWERFNRLLVEYPLERPRIFHAI

SEQ ID NO: 697 - protein, 491 aa, synthetic construct
MMHGDGKSDRPVVPGKPPNKDGRRGPRDHGVPYTGTKAEAPDTAKGTPTEAKARGGPTAEGVARRDRKLRFTALLHHVYDPEMLREEYFCLEREAAPGVDRVTWRQYGEALEDNLHDLSARLKRGTYRAKPVRRVFIPKADGRPRPLGVTALEDKLVQRATVEVLNAIYETDFLGFSYGFRPGRSQHDALDALYTGLLTKKVNWVLDLDIRGFFEAIDHGWLVKFVEHRIADRRVVRLIQKWLNAGVLEDGKRTRSEQGTPQGGSASPLLANVYLHSVFDLWVQRWRRTQARGDVVVVRYADDAVVGFQNESDAKRFRAELAERLSEFALELHPDKTRLIEFGPYAASNRKRRGQGKPETFDFLGFTHICGKKRSNGRFTVLRQTIRKRLQAKLKQVKTGLRRRLHDPVPEVGRWLRSVVGGHVRYYGVPMNGPALHLFRFQVGRLWYRSLRRRSQKARLTWERMRRLIDRWLPPARVCHPYPLRRLGVIT

SEQ ID NO: 698 - protein, 441 aa, synthetic construct
MNLSTPESVQKLQTALHTKAKESPDYRFYCLYDKVYRADVLAHAYHCCRANGGAAGVDGQTFESIESGGLDTWLGELAKELRDKKYRPEAVRRVYIPKPNGSKRPLGIPTIRDRVAQMAAVLVLEPIFEADLEPEQYAYRRDRSALDAVKKVHSLLNTGHKEVIDADLSGYFDSIPHAELMKSLARRISDRHVLHLIKMWLEGPVEESDERGNKHRTTRNKDEGRGTPQGAPISPLLSNLYMRRFVLGWKALGHSKRLQAHIVNYADDFVICCRGTAQSAMQTMTDMMVKLRLTVNEAKTHVCRVPDESFDFLGYTIGRCWSTRTGQPYIGTRPSKKRIARVCETISELTSRRWLLLDVDERVRRLNRTLIGWANYFCLGPVSKAYRAVDAHARYRLRQWLRAKHKVRGAGTAQYPDEYLYATLGLVELARRTRDFPWAKV

SEQ ID NO: 699 - protein, 436 aa, synthetic construct
MIKASVGLQDLRRRIYVKAKAEPSWRFWGLYVHVCKMEALFLAYEMAKKNDGAPGIDGVTFAAIEAQGVAAFLEQIQDELIGRTYVPLPARKQEIPKDGGKVRILSIPAIRDRVVQGALKLILEPVFEADFQAGSFGYRPKRAAREAVSRVAQAIAQYKTRVIDLDLRAYFDTVRHELLLKKVAQRINDNDVMHLLKVMLKASGKQGVPQGGVISPLLSNLYLNEVDRMLERAKVVTRSGQYTYVEYARFADDMVILVDAHRRHDWLMKAVEKRLREEFAKLQVEINEEKSSIVDLSRGESFGFLGFDFRRTRSLKGVWRPYYAPKLKKRTALLQKLKEVFRSHQSQPVDRIVHLINPILRGWVNYFAIGNSSQCFNYIQDWVEKKIRRHLMRSRKRRGFGWQRWSRQWLYGGLGLFDGYRVSRAWSKATSAEQVS

SEQ ID NO: 700 - protein, 429 aa, synthetic construct
MQELPNIDRIREFQRKLHEKAKADPKYRFYSLYDKAYRMDILEEAYRKAKANGGTSGVDGETFDDIEAKGVAEYLTVLQKELKEEQYNPKPVRRAYIPKPNGKKRPLGIPTVRDRIVQGAFLLILEPIFEADFCDSSFGFRPEKSAQDAIREIYKYLNWGCEKIYDVDLEQYFDTVEHWKLMKLLALRISDGKVLHVIKQWLSCGYVEDGQHRQSKRGTPQGGVISPLLANVYLNPVDRAFERNGIGTIKQGSIHLVRYADDMVILAQKNLEKGITLLDSYVDKLGLRLNKEKTRRLDLPTDKKVKFLGFQFHRVTNRKTQKRLILVSPSPKSLKRCREKVKTLINHSNPMAVREQIERLNKYLSGWTNYFRLGNSAHALHQVRYYVNQRVRRLIQRHKGREGYGWKNITSADLYGRLGLFCDYKVRWL

SEQ ID NO: 701 - protein, 465 aa, synthetic construct
MSNRLDQPANVNESDHERTRLRARDVVRDEGISSLQALQRVLYRSAKQDPTRRFHALYDKLTRSDVMWQAWINVSTNQGAPGADGVSIDAVTAGGYEGVTSFLDELSTEVKAETYRPLPLRRVHIPKAGKSGETRPLGIPSLRDRVLMSAAKLILEPIFEAQFSSTSFGFRPKRSAHDALEVIRQSANSGAHWVLDADIKSCFDEIDHEALMALIERRVSDRAMLKLLRSWLRAGIIEGGVYSDSDSGTPQGSPISPLLCNIALSVLDEALAKAKSQTGSVVRYADDWVVLCATKKRAETARSIAEAALAPLGLRLHPEKTRIVHLTRGTEGFDFLGFHHHMVESWKWPGRYYLQRWPSDRAMASIKVKVREMTDRRYVGLSLDDVVDRLNPVLRGWAGYFRRGNSSRKFNVIDSYVAERMAILASNKYGLSGRNWGTRFSYEWFKSLGVYALSGKVISRTAHAQ

SEQ ID NO: 702 - protein, 455 aa, synthetic construct
MQPLDPEVHYGISDRCYLDRHEVPMDLLPDKLHQLRWKLLQKAKKEPKFRFYALYDRVYRIDVLEAAWKHVGKRGKACGIDGVRAEDILERENGVEDFLATILDELKSKTYRPSPVKRVYIPKADGKKRPLGIPTLKDRVVQMAVVLILEPIFEADFHDCSHGFRPGRKAHDALDAIRENLKAGRTEVYDADLKGYFDTIPHDKLMACVRMRVTDRSVLGLIRGWLRAPIIEEDDKGNRQPPLKSEQGTPQGGVISPLLANLYLHWFDKVFHRPDGPGTWANARLVRYADDFVIMARYQSARIDEWISHRLEDWLGLTINREKTSVVRLKRGESLDFLGFTFRYDRDLYGGTHRYLNVVPSKKSLKKARDAIREKTGPKMCYKPTPAVVRDLNTYLKGWCGYFKYGYPRKSFRDLGQYCRCRMTTHLNRRSQRKYHRPKGMSSYQYLQEIGLLRP

SEQ ID NO: 703 - protein, 567 aa, synthetic construct
MNTPTEWCRMQVSELQRRLARKATDKPEHRFTKLYDLLTWEPLMAWAFDKLMTNAGSRTAGIDRMDKRKALHNRDLIIAELRVALKSGTYKHQPVRRVFIPKANGKRRPLGIPTLTDRMVQMMVKAILEPIFESDFRPESHGFRPQRSCHTALAHLHQLTAPRQKKMNWVIEGDITGCFDHIQHTTLTRLLRRRLQDHKLMGIIWQMLQAGVMEGTLFTTTSEGTPQGGIVSPLLANIYLHELDLWFHQNYTGLNYNEKNRRRKRKEGNAFYVRYADDFVVAWNGTREGAEQLKAALTTFLREHLGLELSAEKTRITHVTDGYDFLGFTVKRYRNRSGGSTLITRPSEKSVMKLKVKIKTMTKHGTTRDAVRDKITAMNYLTRGWANYFRHSAASGTLRYVSHYAFKRVEIWLRAKTRQGSKAIYGSYYRRDPHGHLTWSAGGQHLHLPTYTKIERLRYAHRPNPYLTEPEVSPLTHNEAPFGTKEWGGAHYYGEGWTEIRAAVLERDERTCRTCGKKGKVEVHHIRPWKPGMAHELTNLITLCGTCHRQVRDPKSEVNRQLARMTP

SEQ ID NO: 704 - protein, 518 aa, synthetic construct
MDMDRQADEAWILSVQSKLYQWSQANPGDQWRDMWSWLTDIRTLRCAWQRAASNRGARTAGVDGMTVGHIRANKGEQRFLEKLQAELRSGAYRPSPSRRILIPKAGKPGQFRPLGIPTIKDRVAQGAVKLLLEPIFEAQFWHVSYGFRPGRSSHGALEYLRRAALPQKRDQDNRRSRLPYPWVIEGDIKGCFDHISHHHLMNRLRARVGDHRVTRLVVLFLKAGVLAEDQFLRTDNGTPQGGIISPLLSNIVLSAIEERYERWAYHRTKLYPHRKRDGVAAAASARGADRKAGRCVFLPVRYADDFILLVAGTKEDALAEKSALADYLLETTGLELSPEKTKVTALTDGFEFLGFRFGAHWNKCYGFGTRVEVPKAKAADLRYRVKQLTRRNTTLVSLGEKLKEINPILRGWANYYRYCAYAGDVFTSLDWYVGDRIWHWLRYKRPKASAHEILASRRPSQLRRTRKVWQDGSTEQFLLSLTPVCRYRLAWLGKPNFAMSSGEPDAERKSQVRFGKRR

SEQ ID NO: 705 - protein, 520 aa, synthetic construct
MTPNGVTPWPSLEEARTRVLGIQRKLHRWTKDDAKRFDDLFNLTFDRATLLVAWSRVRGNRGSGTAGVDGVTRWHIEHRIGVERFLEELREALKVRSYRPQAVRERGIPKPQGKVRYLGIPTIRDRVVQMALKLVLEPIFEADFCPTSYGYRPARRAQDAIAEIAHFINPPSTYEYVIEGDIRACFDNVNQGILMRLVRERIADRKVLALVNAFLRAGMMKETGGFRATLTGTPQGGILSPILANVYLSVLDRHFERAWKYQTRYIECTTYYRRRGLATYRLVRYADDFVILVRGSREQAEAIREEVARLLWDELQMELSAEKTCITHVDAGFDFLGHRIRRVQWRGKSVAVTYPSKKSLEAVKREVKSLTTCWTRNLSLRVLLIRLNPVLRGWSTYFRYDASKRTLAYVDHFAWWRVFRWLRKKHPQRSVKYLRRRYTGGRWQIQEEDVELFRPSRVRVERYRYRGRRILVPWMEPEELGRVGRYGSYDFDECALLERLQEALASAEQTTVLCGEPDAR

SEQ ID NO: 706 - protein, 491 aa, synthetic construct
MDGDTSVNTGVVAWPEDDAAWLSVRRMQLKLHRWASEDSARRFGDLFNLVYDPAFLVHAFERVAGNDGARTAGVDGVTVAQIETRVGVGVFLGQVRDSLKSGEYRPSPVRQVKIPKGGGKLRSLGIPTVVDRVVQAACKAVLEPVFEADFLPCSYGFRPNRRAQDAIAEIHHFTSRPADYQYVSEADIAACFDEIDHVAVMDRVRRRIGDKRLCALVKAFLKAGVLNDLGDREESLTGTPQGGILSPLLANIALSALDEHFTRQWDTDTGMLGSPARRAKRKRDGLGNWRLVRYADDFVLLVSGDRHHAEALREEVSAVLTPLGLRLAPEKTSVVHIDEGFDFLGFHIRRMRKRGTNKHYVYTTPSRKSVQKIRDRVRNKTYRSTLNMDLDELIAGLNRSMRGWANYFRHGVSKATFNTVDNHAWLRLVGWIRRKHRNTSRKQLRRRFCDQGWRIAHNGVVFTGASSVAVTRYRYRGANIPTPWTQAATSS

SEQ ID NO: 707 - protein, 476 aa, synthetic construct
MNTDESEHALYEAERRVLEIQTKLHRWAREDSHRRFDDLFNLVADPAFLLVAWARVRGNKGARSAGVDGETAYYVEAVRGVEVFLDRLRTSLKDRSFCPLPVRERMIPKAGGKLRRLGIATVTDRVVQASLKLVLEPIFEADFLPCSYGFRPKHRAHDAVAEVRHFTSHSYEWIVEGDIKACFDEISHLALLDRVRARIGDKRVLALVKAFLKSGILGEDRVLRENDAGTPQGSILSPLLSNVALSVLDEYIAKGPGGPGSTFNDRIKRRRRGLPNYRLARYADDWCLMIHGIRADAEVLREEIAGVLAPMGLRLSEEKTLITHIDEGLDFLGWRIQRHRKRGSNRYYVYTYPARKALAAVTDKVKAQCRKTGTDLPLDALLICLNRMLRGWCAYFRPGVSSTAFQYLSSYTWGRVIHWLRRKHPHMNWKELRRRFCGGGWWPASEERELFNPAKVGTTRYRYRGSVIPSPWPITG

SEQ ID NO: 708 - protein, 620 aa, synthetic construct
MAKGGSYINSILLMENVKYIMTNPEIILNNLVKHSKISGYKFERLYRILFNEQMFYQAYQRIASKKGNMTSGTDGKTVDGMSIERIERLIASLRDETYKPHPAKRVYIPKKNGKKRPLGIPSFEDKLVQEVVRMILEAVYEGYFESTSHGFRPRKSCQTALTSIRNTFLGTKWFIEGDIKGFFDNIDHNVLIETLRERIKDDRFLRLIRKFLNAGYIEDWKFNNTYSGTPQGGIISPILANIYLDRFDKYIAEYIQKFDTGKTRPKNREYRIYSDRKRRLLAKFNAETDADKREEMAQRLKEYSRLMYEHPSVDEMTPTYKRMKYVRYADDFLIGVCGSKAECEIIKNDIAMFMKEKLKLELSDEKTLITNAKDRALFLGYEITVRQSQSTKRDKNGMLKRMFNGKVILLLPREVARKRLLSYNAMTIIQVNGKEDWKPKSRGAMNNCKPEDILAKVNSEIRGFYNYYAIANNISTLGKRFGYVMSYSFYCTLAQKLNISYPKVIKKYREGKDCVIRYTDAKGRERCRMLYNGGFQQKEPTADAKCDNLPNPFVISSPSLVERLKAEVCELCGAKGKTVMHHVRTLKTLTENTAWERAMLQMHRKSLAVCPNCYAHIHDD

SEQ ID NO: 709 - protein, 975 aa, synthetic construct
MLEVKVSNRLTCLTTISGPANVVCPIDSGILFHRYYVFISINTPLHSTPMRVCSFFNACSKKRSNCFKAAIRGFSSDLSSSEDKDRTVVSVSSKECFLPVPSRKADMSLSVQSIPSKLSNNHVEGSTDVVDSLRQLKPEKDGIYTRITTRFLANPEFLKLAYAHIKNKEGNMTSGGSNSNIILDGISQKWFEDTALRLKNGTYEFSTSRKINIPKKGSLKLRPLTIGNLRDKIIQKAIQLVLEEIYENKEKIFSDASHGFRPNRSCHTALQQIKNEWTAIPWFISIDIKDAFGTINRDILISCLKVKIRDQRLFEILLKMLQADIISINGIWKEFYGVPQGNILSPILANIYFHDLDVYIDKKIINRYKKGTKAARCLDYQRAVSFTNEEKKASLQKRKQLARRKRRDAHKAGLRYTKIDGSFIRVKYVRYADDFLIGVRGPKTLVLKIFRSVIFFLKSTLQLNLNEEKSKIIDSFSNKISFLGMLIHNVSTKKLPFRKSRALQNKKRKLTRVLLRADALENQRTKKLKDECLKLLRNSYKSSRKDRKPLKEDFISLIKGSPVFGDVIKNSNRAIYREFIQSLLLVSDIQENHTLKDFLNLWEKELSLDTEKFKNENSPTRPITKSETIRRIVEILKVQHNLPAQEVQWFQLFKGANKARGSAWKPVWIDKFSLSKNAVSKLKLPVNNIYHVKYNVENIRLVIEDLLLQAEQRPSKTYIDHIPNNNAKSVRQTWDEEGVFTSLPPQINSDTSEIYKRLKEASIINSKKKPICKNSLLAAEAWLIISYYNTLAHGLLSYFRCVDNFNTIKKIVTYHLRYSLLHTLAHKHKCSIKKVLEIYSKEIKTNGRQGKVVSFINSIAVTNLKKDFLFKDLRNPYSNLTKSYISLQRGAISANKCAVKNCVETDNIEVHHVQKLFRNIDRTGKVVIQGIAKKLSGRLAMESALKRKQIPFCPKHHKDWHNGVISKIDLDEPWV

SEQ ID NO: 710 - protein, 854 aa, synthetic construct
MRDVNNGWLVRYLHSNTASAFFFLVYLHIGRGMYYGSYRAPRTLVWAIGTVSAPKGRYFGSVPRRLFKSGIDSIQFEYRMPLPGMWLITLSFGIAGGRCSMVRILFNLQLTASGIWHGKDNELDTIKHHRPRGNDHNRSCHHFDGVLRVIWLAHGETTTPSATSRRFNCCKCLNQKVTNLSLLRDRTAYAIGTRRRSFHTRGRVERPQQDSKGSSFNQEILETKVLEQRKAAGLTSSKVRKGGKRAALVTLVRKELQLYLDKRGSYNGLINILKNPEYLVACYESIRGKPGNMTKGSTKETLDGLTWEWFVKLGESLAKGKFDFTPARRVMIPKANGKLRPLGINSPREKIVQKALAVIMEQIWERIFLNSSHGFRPNRSIHSALKELYLEGGNYNWVIQGDIEKCFDAIPHSVIMNRVQKIIKCKRTLELIKKSLDAGYIDPDTKKTVNSDLGTPQGSVLSPLLCNIVLHDFDAFMSSMREEYNFGEKRRPNPDYVKLNSKRRYIRDIRERRKILREMRQLLASDPMDPNFKRLKYIRYADDFVILIIGPLGDAEKIKERIRDFLLNKCGLTLSLEKTVISNIQTEGFKFLGAECRRASMTKNHVVKHKDRTIRATTRLRVNIDLTKVYKKLVSIKVATWDNKNLQVPRGTANNALINFSHAEIISWYNSKIQGIQNFYSFAGNRKRLHLVFWILASSCALTLAKKHKMSSMGQIFKKFGRNLTCPETDVSLVRPSALEAIHDYKSNNVPDNLDFLDVTWAAKLTESNIGKSCFLCGSTKDIEMHHLKSVKDVKQKIRNGNASFSAWKGAFLRKQIPLCSYHHDLYHGGKLNYADLKQISSFTKLPDSPSDNK

SEQ ID NO: 711 - protein, 579 aa, synthetic construct
MKEKEDRKLLSSKDIISKDITYELLAIIKNKGNNRYGYLLKFISNVDVLLSSFEHIVRKDGYYSKGSDKQILSNVDIKYFENLSRELNSGSYKPNPSRRVYISKPDGSKRPLGISCSRDKIVQQACMIALSYIYESIFLENSHGFRPYKSCHTAINYFKLHFTSTKWILNIDLKGCFDNINHQKLISIINENVDDKGFEILYWKMVTAGYIYRGTHFKTIEKGTPQGSILSPILCNIFLNKLDIYLLDLKNEFDKGTEKRKNKSYRKLAVKEARKQFITSRDQMDTNFKRLNFVRYADDFIIGIDGSLSDAQLIGAKVEKFLKGELLFEIKRFTIKNFCQEGDNFLGFTLKGWTTKSRKIINTKKGKQLVNHRPKVLIPTTKILNKLHEIGLVKKYSNHFRGTAYRKLVEHPLYNIVEYFNSVYRGIANYYCIAYNINTLRNLNYILKVSCCLTIALKMKLFTVSKVLKKYGRNVTINENDSTIKFISYRKLKKPYFKSIEPFNLDNIIKFFSYGLRSKLKTNKGCENCGSSLNLSLHHFNPVRNINPKLKTLEKIKIKVGRQQILLCRECHNKLHSAK

SEQ ID NO: 712 - protein, 834 aa, synthetic construct
MRKHKRIHFGVFLNIRSLMICESSLLAITMLLTDRRATVRFLWKLRLLINHNLLNSGMFQNTEILTWHYSSTDAGDNSLYLTGVSDLGTVKAYPLRKVTNQVQWVIREGETLAGPVDRSSMPTLTSCQALAIHLETESFDADLPIPKVDQLVFNKKSSEAKPHLSFMPSIAIPVNLQNHKKKMRRGRGAVVPNTMGRALCGLSFTQDRSLSTKTFQSDVSQGRIPNTMIKRLETLSKLFTHNPDAQADGLMRILKDSQIWVAAYIKLKTNPGSMTEGGDKGTIDGTSLKRLLMLRDSVLDNTYLTGRARRKNIPKPQGGTRPLGIPTFRDRIVQEVIRSILETIYEPVFHKTSHGFRPGLSQHTALRDIRKNFRGASWFVEGDISKCFDKVDHTILIRLLRKRIADEKFLSLIKKILVNIVKEEDNTETVSIIGTPQGGICSPLLSNVYLHEFDLFMENLKENYDTGTHRRRNPEYDRRYRKGGVQEARKVSYGAPNDPYFRRLGYVRYADDFLIGIIGPIREAREIREQIRQFLKDTLNLELNMEKTKISNPSSHKIKFLGYVLGKSGRNAYTYIRKYQGTKRKIRVIRGGSPYLKVDTQKVIKALAQKGFCDGKGFPKPNFYYLPEPQTTVIRKYTQILRGLERYYHLADNKRQAISKFNYILRYSAAKLFAAKYKLKSMSKVFALGGKDLSKPIKSKNAIGITDSALAEMEETVTNKPSRRRTQTLKGLPFTKYSTISKPDIGVFTKYKNNHPFSNPLESLTWRTIRGVDAFKLPCAICGAENNVEMHHIRQLKNLKGKDLIEKKMISAMRKQIPLCRKHHLAAHGKKMYK

SEQ ID NO: 713 - protein, 825 aa, synthetic construct
MHIIQDLEDRHNHLNNTNLKSSISMWYERWFLSTNAKDIGTLYLMFALFSGLLGTAFSVLVRRCAKLLLNDPFILHSSNMLTTSGLVGLERVPMNIACLSKALSIWNQVWESMRVVVPMVKTTLFKLYLKGTSRKGSKLAWNRLCILIEIMYVRILIRCNITQITCSNKREEGEPKGTIGNNYELRDHLRGRSSLLYGDGDFVVGGKTPKGVRMFSSKGVKEGSGVRPDLNQSELPNKFTKLIDISSNKVNNMKFNDLYTLMFNMKMYEVAYHKLKSNPGNMSPGIDQITLDGISQEVFQNIILTMKDESFKFKPGRRVDIPKANGKTRPLTVASPRDKIVQEVMRMILEAVFEPTFSNNSHGFRPNRSCHSALRQVKTQFGGASFFIEGDISKCFDSFDHDKLIELIRERISDERFIRLIWKSLKAGYVQFHRTKLSIIGTPQGSIISPILSNIYLNKLDLFMDKLKDDFDQGKSAKINPIYKSLDYYRQKALKANDQLGALKYLKEMQKIRARLPKDDNFKRLYYVRYADDWIMAIRGPLSETTRILESTREFLRKELNLDLSKEKTLITNPHKDTAMFLGTQIRISNHTYFYRGPNGQTIRAVSQLIFTAPIDRIQKKLADAGFWDNANKRSVPRMLWYHENKDAIIILYNSVIRGYLNYYSFVSNFGRLAATVEWILKSSCTQLLAAKFKLGTTLKVIDKFGEDLKGSDNIALLKPSYRKNTWDFKLNNSYVNLKALYAKGISKASLDGLVCSKCESDVQVEMHHIRKLADLNPKLSEIDRIMASKKRKQIPLCRACHIDHHKRSFLDRTRSKSLIRKIIK

SEQ ID NO: 714 - protein, 694 aa, synthetic construct
MRVEKNQYQELSLTAIIIRDVISMTKGVLRVNIPVVTVTVGLPKSRKRYGNGGLIVAGIKTQVFSNTSKVMFRECEVTQRRGLTTSNLVMGHKKLVQDLNNNFYKDKICNPTKLIQAYELVSSNKGSNTKGIDSETLDSYSKDTIHSVSKSLKDHSFKFKPIRRVEIAKSNGGSRKLGIPSPRDKVVQKVMAMALEEIYEPKFSNSSHGFRPKRGTHSALKSVTRWSGTKWFIEGDISTCFDTLDHHILETLLKKEISSKPFIDLYWKAVKSHYINPVNKVEEFSNVGVPQGGVLSPILSNIYLHELDKFMQTKIEESKKSGPTSIDNPHYKKVHTKISNMRQYFSPTYRRNRSLTKEQEQERLKEILKLEKVRTKLSSTIQGPGYRVYYVRYADDFLIGINGPRRIGEKLKQELQTFLLNELKLTLNLEKTKVTRSDHGACFLGARLKRHASRTNDQKRRTSSVTRTGRKVRARVPQGNIIALAPLEHLIRKLQSQGICKTRNLKKHDVIPTRKTAWTNLNLVTIVQKYNNVWQGLLNYYSFAYNRCQLNWIQYLLHHSLACTFMNKLKLNSRRQVFKKYGKTIQVKDESGKLVAFKLVKSLPRIGKFSNKILPSGFETFKYSLRTQSVFDKACKICGTKRNVEMHHRRPLKAHKTDNTLKSIQINQSRKQIPLCASCHQRVHNGLYDGPGIY

SEQ ID NO: 715 - protein, 601 aa, synthetic construct
MQEIETVLNVIQNRGKQGKSLERLYRQLFKEELYEKAYAEIHANEGAITKGSSNDTLDGMSQKRIAEIIQKVRTTTYRWNPVRRTYITNEDGRKRPLGIPSGDDKLLQAAMKLLLEAYYEPQFSKRSHGFRPGRGCHTALKQIRESHRDTSWFIEGDIKGCFDNIDHETLLGIMEEKIRDQRFLNLVEYLMKAGYMEDWKWYGTYSGTPQGGIISPLLANVYLDTFDKWVEEELLPHYNFGSQKEKGRKRNPEYRHYEYKRSQAKKMGDVEAYERYGKMMKNVPSIIDDDSYRKLEYIRYADDFLLSFAGPKKEAEEIRERISEYLERELNLELSIEKTLITHARNDKARFLGYDLCVMQSDERRTANGTIWLGVPREVRRKAMRKYTKKGKAVHRPELLLNSDYDIVARFQAEYRGLVQYYQMAHNVHRLQEVEWVTGTSLLKTLAGKHKTSVNKIVKKHKSTRTVNGKTYKVFEARAERKGKEPLTTHYGAVPLIRKPEASITDRIVTLGKGRVELLQRLSNDECEMCGEKGNIEVHHVRKLRDVNKPGRKNKPAWVHRMSALRRKTLMTCVNCHDAIHAGKHRSEWDNWKIVLESRVR

SEQ ID NO: 716 - protein, 591 aa, synthetic construct
MQSAEVVLGVLRERGRKGLPCEQLYRQMFNKDLYLLAYGNIYSNSGAMTPGASEETADGMSEEKIEQIVEAMRCERYRFAPARRTYIPKKNGKLRPLGLPSWSDKLVGEVVRLLLEAYYEPGFSDLSHGFRKRRGCHTALRKVHDTWTGTVWFIEGDISDCFGSLSHEILLGILAEKIHDQRFLRLIRNMLKAGYLEDWEYRETLSGCPQGGVVSPILSNIYLHKLDEFVEQELIPQYTRGTGRKVNPVYKRLHRHMTSARLRGDRAAVRDLKKQLRAIPYGDPMDPGYRRLKYIRYADDHILGFIGPKAEAEQIKARLAKFLRETLGLELNQQKTLITHARSQPARFLGYHVRVQHCNTKITGGQRSANGNIALRVPPDVIRSQCARYRKHGKPWYRSRLQNLDDYDIVRTYGAEYRGVINYYLLAQDVSRLHDLQWNAETSMLKTLALKHRSTVSKMAARYKAKIETSDGLRTCFEARKHREGRKDLVARFGGIILRQNRRAVITDPASGPPLYPRKELTRRLRKRECELCETGTTVAVHQVTGLKDLGKPGAGQPAWATLMAKMRRKTLIVCAPCHDWIHANPVAHAA

SEQ ID NO: 717 - protein, 594 aa, synthetic construct
MKPTSEILERMNRNSGEHPEGVYTRLYRYLLREDIYMTAYNNLYANNGAGTKGVDDDTADGFSVEYVQQIIAELKALNYSPKPVRRTYLKKKNGKLRPLGIPSFKDKLVQDAVRQILESIYEPIFSDFSHGFRPDRSCHTALKQASKYFRGTKWFIEGDIKGCFDNIDHTVLLNLLSEKIKDSKFVTLIGKFLKAGYMESWEYHKTYSGTPQGGILSPILANIYFHELDKKVEQLRADFSQPNPKSCSLEYGRIRREILKKRKQYGELTDDTQKKSLLREIHKLETEMRKLPYKDATGRKIVYVRYADDFLIGVSGSRKDCEKIKQELTAFISEKLKLELSDEKTRITHSSENARFLGYDINVRRNNQTKRTAKGTVQRTLNQSVELLVPFEKIEQFMYQREIVIQAKDGSLIPWQRDAMAGLTDLEVLDTYNSQTRGICNYYSLASNFSKLTYFVYLMEYSCLKTLAKKHKTRISAIKKMYQCGSSWGIPYETKSCKKRMMIIKFSDLKKGVVYQNADIIKHHIHFTNHSSLEDRLRANQCELCGATDVPLEVHHINKVKNLNGKEQWEKAMIARKRKTLIVCKNCHIAIHHS

SEQ ID NO: 718 - protein, 596 aa, synthetic construct
MKPTMEILASIKENSSKNSEEVFTRLYRYLLRQDIWFEAYKNLYANSGAATNGVDNDTADGFSKEKIDKIIASLADETYKPKPARRTYIKKANGKMRPLGIPTFTDKLVQEVLRMVMEAVYEPVFLNCSHGFRPKRSCHTALSTLKKEFTGAKWFVEGDIKGCFDNIDHAVLVGFINQKIKDARLIKLIYRFLKAGFVENWQYNNTYSGTPQGGIISPLLANIYLHELDKFVMTLKSEFDKPNETVRTKEYNRLFTQRVKLKKLIDCADGEEKQDLLKQYKQVRAEMMKTPYTPQDDKKIKYIRYADDFLIAVKGNREDCMEIKRKLAEFISGTLKMELSDEKTLITHSSEKARFLGYDVSIRRNSSIKPHGKGRPTQRTLNNKVELLIPKDKISKFLFSKGIVRQKKCDEMFPISRVPLRNSTDLEIITIFNAELRGICNYYSLASNFSDLNYFNYLMEYSCLKTLATKHKTRITKIKEKFKDGKGSWAIPYETKSGKKLMYFAKYTNCKGANATDTVTKAAVTIGYNRNTFDKRLNADICELCGKTGAGNYEIHHIHKVKDLKGKELWERAMISKKRKTLVVCHQCHQNIHHPK

SEQ ID NO: 719 - protein, 568 aa, synthetic construct
MDYTESDFDAASPDEVSEWHSIDWKAVQYFVGKEQSKIAQAEQAKDFRRVKRLQRNLTRSWQAKALAVRKVTENQGKRTSGVDRELWDTPQKKWIAVSRLNLHGYRALPLKRVWIPKADGKERPLGIPTMRDRAMQALCLLAMEPAAECHADPNSYGFRKGRSTHDARQQLFVCLSKKVSAQWVLDADITGFFDNINHDWLLANVRMNRRVLGQWLRCGVVDKQQLQKTEAGTPQGGIISPLLANLTLDGLEAGLMRFLKDQLGFEKAKKAKVHLVRYADDFVVTGDSKEVLETVVRPWVEAFLRERGLQLHTGKTRIVHINEGFDFLGWNFRKYSETLLIKPSHKNVKAFYSKVREVIAGHLSQPKEVLIAKLNPILRGWARYHQGVVAKATFTKLDHQILWRLRRWGMRRHPRWTRGKVFKHYWTHTSGRWEFEAKTRNRWDEEMQLRLYTLADTKIVRHKKVIGEYHPYDPAWEAYGEGLKRNRMVQSVWSGQRLELWMTQNGKCAHCGTDMDHEDSGLDNHHIVPVRWGGTDSLSNRVLLHPWCHRRIHALGLEVAKPVPVRGL

SEQ ID NO: 720 - protein, 493 aa, synthetic construct
MNVEQSMCAASGPAMQWEQIDWSRCEQKVRRLQARIVKATQEGRRGKVKALQWLLTHSFSGRALAVKRVTHNKGKNTSGVDKAIWRTPASRYKAIDTLRRRGYQPQPLRRVYIPKANGKQRPLGIPTMKDRAMQALYLLALLPIAETTGDLNSYGFRPERSTADAIEQCYKVVGMRHSAQWVLEGDIRGCFDNISHEWMLDHIPTDKEVLRKWLKTGYMENRKLFATEAGTPQGGIISPTLANLTLDGLERLLKQTFRNRQVGEKHNPKVNFVRYADDFIITGSSKELLENEVKPLVESFLLERGLQLSPEKTCITHIEDGFDFLGQNLRRYGRKVLTKPSKKNMHAFLEKVRGAIKRNSTAQQANLIGILNPIIRGWANYHRHIAASSAFGKAEMAIWRSLWSWAKHRHWKKPTAWIANRYWHRLGNGRRMFAVMAGSNAPKSRAMVAWLVNPAKTPIRRHIKVRSNANPFDPNWRSYYDARKSLKRASSQQ

SEQ ID NO: 721 - protein, 523 aa, synthetic construct
MLKEERQMTQLGNFKIPKSGASSTNKLNWQSINWVKVKRDVRRLQMRIAKAIREKRYNKAKSLQWVLTHSLSAKLLAVKRVTSSSGSRTAGVDGKICASNKDKMQLALSLRRYGYNAQPLRRDYIPKRNGKQRPLGIPTIKDRAMQALYLLGLEPIAETLADPNSYDFRQQRCTADAIEQCFKVLSHKTSAQWILEVDIEKCFDRINHNWLKENILMDVSLLNQWLESRYIERKQLHPTLAGTPQGGIISPTLANMTLDGLEKAIKSVAKPASKVHVIRYADDWVVTGNSQEILENKVMPAIEKFLKVRGLTCSREKTKIVHIKDGFNFLGFNIRKYHDKLLIKPATKHVHAFLKMVRNITKASVSLPTDILLRVLNPKIRGWGNYYRHVVSKDVFCYVDNCIYLAIARWARRRHPQKPAHWLRKKYFRQQGMRNWIFSTKVYDKKGKIVNRDLVQLKYLPIKRHRKIIAEATPFNPEYIEYFLKRKSYQGLNWLYRSLQKQAKSFSRSAKLQNQNSRIEQES

SEQ ID NO: 722 - protein, 461 aa, synthetic construct
MKLTYKQAIRPFARGPPLRLVQSHFAELFIRRQQNLLMNFCYSDERRWRNINKSTVPAEIQRWKDIDFRKAEIKVKKLQRRIASAWANKNFKTVDTLQHKLIHSFSAKALAVKTVVDNKGSRTPGVDGVIWSDLRQKLDAIYQLRRRGYKPMPLRRVYVPKKDGTLRPLSIPTMRDRAMQMLCKMALEPIAEATADKRSFAYLSGRGAREAIICLKVTMRDNPQFRWVMKADVAGCFDNIDHSWLLEHIPIDRKILYRFLKCGYIEDSTFYPTERGVPQGGCISSVLCNMTLDGLEGLLKQQFGLSVCMIRYADDIIIIGESREILVQAVTPVIESFLAERGLALSKKKTGYYPVKAGVSFLGWKTYRDRDRVISEPSNIAVNRLMNEIESIAALAIDYHAQCEKVSSKIRGWLNYYRGIAPRLSLNEVEFYIAQSLLHMQDVELLAGEIQSIFSELLDTL

SEQ ID NO: 723 - protein, 467 aa, synthetic construct
MIRHRDNSSESWKTLPWKQLSRNLFRLQRRVYKAVQVGDKRKAKSLQKLILKSTAARLLAIRQVTQLNAGQKTAGIDGQTALTFEQRFELSEKLRTEANNWKHQGLREIPIPKKDGKTRILKVPTIADRAYQCLVKYALEPAHEATFHARSYGFRTGRSAHDAQRQLFNSLNSQANGIDQRVIELDIEKCFDRINHTAIMDRLIAPLSIKQGIFRCLKAGVNPEFPELGTPQGGVVSPLLANIALNGIESIHRYHRDSNKRITDKTSAESIIEPSVRYADDMVIILRPQDDATVILDKISHFLAERGMKVSEKKTLVTAATDGFDFLGWNFKVQNNGKFKCVPSVDNYKAFRKKVKAIVNNSNYGATTKAEKLAPVVRGWRNYHRFCKMDGSRFSLWHIEHRAFKVFNSETKQNCHTCKQLLKKAFPQVPYSENKYINVTGEKSPYDGDLTYGSERNSPLVIRQKYL

SEQ ID NO: 724 - protein, 607 aa, synthetic construct
MSTASSPLVYEWNDIPWRSIERKVFKLQKRIYQAAQHGNKVAIRKLQKLLLSSWYAKCLAVRKVTQENKGKKTAGVDGKLALSPKQRIRLVQTLSLKPKSTPVRRVWIPKRGSDEKRPLGIPTIENRAQQALAKMALEPEWEARFEPNSYGFRPGRSAHDAIEAIQQSIKYTQKFVLDADIAKCFDRINHQALLEKLETFSVMRRAVKTWLKAKIMDGDELFPSEEGTPQGGVISPLLANIALHGLETAITTAFPKTVKIDGIIHGRYQPRVVRYADDFVVLHADLKLVEKATSIAQEWLSGMGLELKPSKTRITHTFKKHEGNVGFDFLGFHVRQFKVGKCNYRTSGHSRILVDFKAIIKPSKEAIARHYRQVAEVIERNKSAEQANLIRLLNPKIVGWTNYYSTIVSKAVFSKLDHLVTKKLLRWAKRRHQHQSRRQTVRKYWKFSEKGRGWIFQASDISILRWYADVPIKRHVQVAGTKSPFDGNWVYWSKRLQHYPLLTFRQAKLLKEQEGKCRWCRLYFKQGDRIEVDHRIPRRYGGRDEYGNLQMLHVHCHDEKTAIDGTIDSVGPDSIDVNDYVIEEPCEVESLTHGSEDEAFGRPDVLV

SEQ ID NO: 725 - protein, 553 aa, synthetic construct
MQTMRNANVTKRTTDWRSINWRKAYRIVRNLRQRIFKATQKGNLRKVRSLQKLMMKCYSNILLAVRRVTQINRGKNTPGVDKLIIKTPEARGILVDTLSLFIPWKPLPTKRVYIPKSNGKKRPLGISTIIDRCIQAIVKNALEPYWESKFEISSYGFRPGRSAHDAIEKIYLTACPHRRKKWVLDADIKGCFDNISHEFLMKTIGNFPARKLVYQWLKAGYVEQGEYFHTSSGTPQGNIISPLLANIALHGMEEALGIKYNNRSEIVGNRALVRYADDFVIFCETKEDAEQAQTALEKWLNLRGLELSKEKTRIVHLKEGFDFLGFNIRQYQVTNTKTEWKLLIKPSKESILNIRKKLRQEWLNLKGHNVNSVIEKLNPIIRGEANYFRIGVASEAFSALDDWMFKRECKYVNRTHPKKNKQWRANKYWGKLNLERNDKWVFGDKNTGKHILKFSWFKIKRHKLVVGKSSPDDPALRKYWEEREKDKTSNHPKSIQKIASKQGHTCPICGQSLYNGEEIHKHHKTPKSKGGTDNYSNLELVHLYCHQQIHSGT

SEQ ID NO: 726 - protein, 557 aa, synthetic construct
MTKLNQKWHNINWNKTSKYIKNLQEELVVAYKNNDQKLLFSLQEKLMMSFEGRALAVRQIVTNDGKKTPGFDKIIWNSPSAKLQAILQLREILIQKSGDYQTGPVRRTWIPKDQSDELRPLGIPNMIDRGLQALVLMCLDPIIEEMSDTYSFGFRKYRNTGNAIQRIRTILDKPKGPKWVWDADIEKCFDKISHEFLEKETKLIACPKAYEYIIKWLKAPIINKGIKTFPSDGTPQGGILSPLLCNIALNGLENAVRDGLPSPNSSEGRKISGSWVIRYADDFIVTSPCKERLVKEHIPRVSFFLSKRGLNISEKKSKIRSLENEGFTFLGWDVTLKSRSLKRNKSKTNKKVLIIRPSKKSIKSFKREIKDKFRSNKPIRALISELNPVLRGWTNYYRDSYHSQEVFQSIGHYIHQLWWKWAQKKHPKRNKNWIYNRYIFNTEKNSWRIGESKDIMLFDVIQAKQLRIKSLRNNVNPYLDEDYYIQRTVIRDSEKFRVAIYKKQDFRCYVCEQSLYGSEEVHLHHLIPRKDGGQYTLENIVPVHATCHESITYTRKD

SEQ ID NO: 727 - protein, 499 aa, synthetic construct
MSVSEPEITSVTDLTDKELTLQWKTIDWSKAEGIVNNLQSRIASAAKEGNWKKVSKLSRLLTHSYYARALAVRKVSTNKGSRTPGIDGVLWTSSGDKMRAVLQLKSKGYHAKPLKRKYILKKNGKLRPLSIPTIYDRAMQTLHALALGPVESATSDKTSFGFKPYRSTKDAFAYLNICLSKKNAPQWIVEGDIKACYDEISHEWILANTLMNKKVLKEFLKSGYIENYHLFPTENGTPQGGTISPIIANIVLNGLDTILAEVFYSWNNGTIDKKHRNKHRVNFVRFADDFVITADSPETAHKILDIVKTFLEPRGLTLSKEKTLVTHISDGFTFLGWNFRKYKGKLLTKPSKESQKDIITKIHDVMYKARARSQSELIRLLNPIIRGWAQYHNHAISSAIFKKLDHIMFIMLVSWARRRHPNKGFAWIMAKYWHRIGKWKHAFSTDSQTLERFSNMKIIRHRLAKLDKNPYIDRDYFERWRVIEHYRKKQISYSKSSLN

SEQ ID NO: 728 - protein, 565 aa, synthetic construct
MNDIKTSCASTDRKIVAWDSIDWDKCEYEVQKLQARIVKAQKDGRYCKVKALQWTLTHSFSAKALAVKRVTSNKGKETSGVDRVLWDSPLGKWKAISTLKRRGYCPLPLKRVYIKKSNGKLRPLGIPTMKDRAMQALYLMALDPVAETTADNHSYGFRKERSTADAIVQCFIVLSRTVAPEWILEADIKGCFDHISHEWLLNNIPMDRVMLKKWLKCGFIFNKILNPTEEGTPQGGIISPTLANMTLDGIQKLLQERFKKRKVKGVEIYPKIHLVRYADDFIITGRTKEVLENEIKPLICEFLAERGLTLSEEKTKITHIREGFDFLGFNIRKFNNTLLTTPSEKSIEKFLEKIRTIIETKKSTKQESLIRVLNPIIKGWSNYYRTGTAAKSFQRVDWEIFRKLWQWARRRHSQKCKGWVKEKYYRRIGNQAWCFSAEKEIQKKGELKYVQLVHLAAVKTKKHVKIRHDANPYDTNYKCYFEERATRKKLEALKGKSSSWKYAWELQKRKCPICGETLNLNNDWKISKQFVDGKLKERIYHEDCYYNDVHPTKKKYYESVSLQKL

SEQ ID NO: 729 - protein, 417 aa, synthetic construct
MSNNVSPYKAVRTMERLSEAWKQVYKNGIKSTSIDTKNEILEFKKNEIKNLRKIQRLLQQNKFKFENSRGILLKRKGKDPRPIVIASVQSRIVQRSILDVLQENSSIKKYYLSVPTSYGAIKGEDKGVRNAIIATIEAIKNGAEYFYKSDIASFFTKIAIPKVIEVISTFIPDKDFVELLRNATILEISNLNDLGDLKHYFIFDDIGTPQGCCLSPLLGNIFLAEFDKELNKNDIICLRYLDDFILLAPTEKAVRAAFRRASKILAKLSLEAYTAVSDPKKAKVGYYKQGFEFLGVEILNKLIRPNKASCNKLLNEIKEIIKNSLEMNFSMTQSLYKEEYSVTKTLYHIHNKIKGWGNQYYFCNDRNIFITLDEKISGEIDRYLNSFLLKREKLDAKQKRKQLGIHLLIDSKNVPIT

SEQ ID NO: 730 - protein, 439 aa, synthetic construct
MNQQGHRHLSSLSLEVRKRRTLEDAWAAIRANARVSKSADTRKEIEAFEASLSSNLRRISSELQKGKFAFAPAKGVKIPKGADKRQFRPLVVARVESRVVQRAIHDVLSEVPALQPLIYTPHSFGGVKKKRKGELAAVPAAIQAVLDAIKAGGTYLVRSDISKFFTRIPKSSVTNLVANAVDDVDFISLFESAIKVELENMAQLRESASAFPIEDIGLAQGNCLSPLLGNLFLHSFDEEMNRQAGVRCLRYIDDFIVIGTSSECAEKAFSLATQRLKTLGMEISAGKTKEGRVRDGFEFLGIHLSPGLIRPSKSSRDRLIQSVKSAFDESNKGMLGAKKGSAILKSQSLLETLCRVGGIIQGWGKHYRFCNDQETLRQLDVKIEALLKRYLGIYREARDTVGGATKWNLLGIESLAQIKRTPFSWPEVEQKQSASSAAK

SEQ ID NO: 731 - protein, 437 aa, synthetic construct
MKTLLQDVRSEQNIFAAWRHVKSSAINSRNDDIRGAASAFEHNHQKFLRRIILQLRAGTFEFPAATGVLKDKKLRASQNKAPRPIVVTDLETRIVQRALLQVLQPRETLDPRSRNSSLRIKKDERLGSLNDVNVSKYGVGGLIAPHGGVESAIRLITHAIDSGANYYFRSDIEAFFTKIPKSNVVERIAIETRDMDFANLFARALEVKLNNIEQIGPFEYLFPTGKEGVAQGSPLSAFAGNVLLYQLDQELNALDVTAVRYIDDILIVAQDVDRLNQAIDYAEQSLSKHGMKLYEPKAGSSKAAKGRCDNGIDFLGCFLQPNKCIPSADSIARFKSRVTSELSDSKSRIKDALKVGKLLDKRFSTTATLDRVFNYVYGWQKAFSFCSDVVPFEQLDRFVRRQILDYEIAVRRIVKDSSDESQTMVMGLPSMRQLHKG

SEQ ID NO: 732 - protein, 413 aa, synthetic construct
MSRLYKDICSQRTLYGAWRKVRSSAFFSSSDEIKREAEEFESRLPDSLIEIQRALSKQAFIFLQQTGVAQKKPGGKSRPLVLAPIPNRVVQRALLDVLQRKVRFIKRVLITPTSYGGIPEKRVAMAIADARKAMLAGARFHIRSDIPAFFTKINKDRVLEILRPHLNCAATLKLFEEAIKTDLANIDDLRRRRLDDIFPLGIEGVAQGSPLSPLLANIYLADFDQTMNSNGITCLRYIDDFLLLGASLSDVDKAFNRSLKELGKIGLGAYDPRTNKAKASRGTTDTGFDFLGCNVSPGLVQPSEATRKRFKMKLDAEFATASRALRYNAQNRDGDGKYSYSSALYRIDKIILGWGKAFTFCNASQTMKALDDFVSQKLMTLEAEKNAVLARSNSEARRRVLGVRLLTYVASPA

SEQ ID NO: 733 - protein, 420 aa, synthetic construct
MSFTLYEEVSDQDTLAAAWRHVRRSGMLSQSEKTKESIKAFDSDIDTQLAKIASLLREHSFDFGTAKGAPIKRPGKEPRPLLVPEVPARIVQRSLLDTLQNQPGIQAYVDHPCSYGGLPKKNRADAIRHACEAIADGATYFIRSDIHGFFTGILRQGVLDTIQETLRDDSIASLLNEATSIEIGNAEEIQPYLHLFPDYNEGIAQGCCLSPLFGNIYMHQFDEEMNRGDVVTLRYIDDFVILGQDRESTEQAFRQARRMLQALNLSVYRPGDGSRKAAEGSIKRGFEFLGCTITPHCVEPSRAARSAFLERVRNQLDLAAHEMRAGLHELPEHYRSSLVQTLSRISRMIRGWTEQYRFCNPSDAFTSIDVKVDRMVGAYLRSFFKHYKKCKRSPAVRRRLLGIWLATDSSRTPILPIRSK

SEQ ID NO: 734 - protein, 338 aa, synthetic construct
MEKNLKSVYLGRLQNALEAQQRTKEEIITCTQYAQKLMADNLPVLFEENHVYQVLKWKKSNQQQYHTFYLVQKGKERKITAPSRELKRRQRWILDNILIKLKVSDYAHGFVKNRSIRTNAELHMTHDYALCMDIEDFFPSIKEDTVKEVFARAGYSRRAANALADMCCYFGALPQGAPTSPYLANLVFIEKDHELALLAKQHDATYSRYADDLTFSSDNPLGNLSEAVNQVLQNNGFRLNDSKTKEFFPGQPKRITGLIVQNGLIRVPRKFKRTLKQEIYYCKKYGVALHLENTRAHKAINYREYLYGKAYYVNMIEPELGKHYLKQLDEILWPSYYL

SEQ ID NO: 735 - protein, 337 aa, synthetic construct
MSYVQKLKDKMVEQGEDENYVELCVSYTQKLCNNSVPVIFDFKHLSLLLGYEPPELAFYLFAPEDSFYTKMQIPKKSGGMREIEIPSDKLKSIQRWILRNVLENIEVHESCYGFTKGKSIYDNALLHVGKECVLNMDLKDFFPSITQKAVFNIFYQKGYTKSVSYYLAKLLTKDGVLPQGSPASPKISNIVALHLDKRLSELAKCYKATYSRYADDLTFSGASNIKNMIPIITQIIHEEAFFVNEKKTRYSYYFQKQEVTGLIVNKKVSVPKEYLRELNKEIYYCKKFGVSSHLTKIENHKSFFKEYMYGKAYFVNMIDKELGQKILCELDTILWEY

SEQ ID NO: 736 - DNA, 20 bp, synthetic construct
  source 1..20: mol_type = other DNA
  modified_base 1..6: mod_base = OTHER; note = Phosphorothioate linkage
agacggtcacagcttgtctg

SEQ ID NO: 737 - DNA, 20 bp, synthetic construct
  source 1..20: mol_type = other DNA
  modified_base 1..6: mod_base = OTHER; note = Phosphorothioate linkage
  modified_base 15..20: mod_base = OTHER; note = Phosphorothioate linkage
agacggtcacagcttgtctg

SEQ ID NO: 738 - DNA, 20 bp, synthetic construct
  source 1..20: mol_type = other DNA
  modified_base 1..6: mod_base = OTHER; note = Phosphorothioate linkage
  modified_base 15..19: mod_base = OTHER; note = Phosphorothioate linkage
agacggtcacagcttgtctg

SEQ ID NO: 739 - DNA, 27 bp, synthetic construct
  source 1..27: mol_type = other DNA
actctgtgagcggatcttggcttagcc

SEQ ID NO: 740 - DNA, 1836 bp, synthetic construct
  source 1..1836: mol_type = other DNA
atggactacaaagacgatgacgacaagtacccctatgatgtacctgattatgctgccagcaatttcacacagttcgtccttgtagacaacggcggcaccggggatgttacagtggccccgagcaatttcgcaaacggcgtagccgagtggatctcctctaatagcagaagccaggcttataaggttacatgctctgtaaggcagtcttccgcacaaaatagaaagtacacaatcaaggtcgaagtgcccaaggttgctacacagaccgttggtggagaggagttgccagtggctgggtggcgctcctacctgaatatggagttaacaatccccattttcgctaccaattcagactgtgaactcattgtcaaagctatgcaaggtcttcttaaggatggtaacccaattccaagtgcaattgctgctaattcaggcatttattctggcggcagcagcggcggctcaagcggaagtgaaacacctggaacttccgaaagcgctacgcctgaatcttctggtggatcttctggcggatcttccgcatgcatggatacttcctctttaatggagcagatcttgagtaacgagaaccttaatgctgcttatcttcaagtggtacggaacaagggggccgctggcgtggatggaatggagtacaccgaattacagaaacatctgtcagagaacggggagataattaaagaacagctccgcacccgaaagtacaaacctcagcccgttcggagagtggaaattcctaaggccgacggtggcatacgcaagctcggcgtgcctactgttaccgacaggtttattcagcaggcaattgcgcaggttctgacgcccatctacgaagagcagttccacaatcattcatatggctttagacctaatcgatgtgcacagcaggccgtgatgaaagctctggagatgatgaatgatggtcactcatggatagtcgacatagatctggagagatttttcgatacagttgaccacgataaacttatgacgatcatcgggaggacaatcaaagacggcgacgtgatctctattatccggaagttcttagtctccggcatcatggttgacggagagtatgaggactcagtcattggtactcctcagggcggaaacctttcacctttgctcgcgaatatcatgctcaacgagctggataaagaaatggaggctcgcggcctcgatttcgtgcgctatgctgacgactgcattattatggtgggttcaaggcaggcagctgagagagtgatcagatcaattacaaggtacatcgaggagaaactgggcctgaaagtgaacgcatccaagagcaaaattgacaaacccaaaggcataaagtacctgggctttgggttttactacgatagttttgcgaaagaatatagggccaagccacatgccaaggcagtagagaaatttaaggcacggatgaaggaactgacatgtagatcatggggtgtggacaatgggtacaaagtgaaaaagttaaacgaactgatcaggggatggattaattattttaaaattggcagtatgaaagggctctgcgaaaagctggacgccaatatccggtaccgcctgcgaatgtgtatatggaagcactggaagactcctcagaatcgggccaagaatttgataaaactcggtatctcccgccgatacgcctggtccaccgcctactccggagcgagaatcgcctacgtgtgccagagaggagccatgaacattgctgtgacaaaggaaaggttgacaagatttgggctggtgagtatgttggactattacgtggagcgccgctccttaatgttgagttga

SEQ ID NO: 741 - DNA, 1851 bp, synthetic construct
  source 1..1851: mol_type = other DNA
atggactacaaagacgatgacgacaagtacccctatgatgtacctgattatgctgccagcaatttcacacagttcgtccttgtagacaacggcggcaccggggatgttacagtggccccgagcaatttcgcaaacggcgtagccgagtggatctcctctaatagcagaagccaggcttataaggttacatgctctgtaaggcagtcttccgcacaaaatagaaagtacacaatcaaggtcgaagtgcccaaggttgctacacagaccgttggtggagaggagttgccagtggctgggtggcgctcctacctgaatatggagttaacaatccccattttcgctaccaattcagactgtgaactcattgtcaaagctatgcaaggtcttcttaaggatggtaacccaattccaagtgcaattgctgctaattcaggcatttattctggcggcagcagcggcggctcaagcggaagtgaaacacctggaacttccgaaagcgctacgcctgaatcttctggtggatcttctggcggatcttccgcatgcatggaactgattgactggatcctggctgaccagaatatcgacgctgcaatttgggccgtgaaacacaatcgcggcgcagcagggatagattcaatgcaggtcgacgaactcgatgaatattttaagaaccatagagaggagattaaacaacttatacgagaaaaaaagtatgtcccccagccggtgcgcagagtctacattccaaaacccgacggaaagcagagacccctgggcataccaaccgttgtagatcgtgttattcaggaagcaattgcgatagtgctgatgaagggatatgatagatacttttccgagtacagctacggcttccggcctaaccgaaactgccaccaggctgtcactaaagccctggaatacatgaacagtggctacgagtgggtggtagaccttgacattgagaaatactttgatactgtaaatcatgataaactggtttcaatattaagggagcgaatcaatgacgacactaccctccacctgattagggctttcttgaaagctggagtgatggaaaatgggttggtctcaccaactgagcagggcgtgccccaaggcgggccactctctcctgttttgtctaacgtgtatctggacaagctggacagggagttggagaacagaggcttacacttctgtcgatacgctgatgattgtactatctatgtaggaagcgagatggctgcaaatagagttatgaggtctatagctgactggctggggcgcaagctgaaattaagagtcaatatgactaaaagcaaggtggtacggccttcaggcagccaatttctcgggtttcggttttggaagagcccaagggaaggctggaaacctaaacctgccaaagagagatgcaaaagactcaaggataaggtgagggcgatcttgtgtcgccgaaaggccgttgcagtgcccttaggagtcacgattacaaagttgaatcagttaatgcgtggatggatcaattacttctgcctgggttccatgaagggatttatgaaggagtttggggaatggatgcgacacaaagtacgcgttgtgattttaaagcaatggaagaaggccgatactatctacaggaacctgaggaaaacaaatcgtatctgcagatgtggcatttctgacgaagaaatatacaaggtggcttattccggtcgaggttggtacaaacgagctactcataacgcagtgaatttcatactgagtccacaggtactgagtcagcggactaagcaaaggccaggactggtggatccgcttaagtattaccttgcaaggtgtacttga

SEQ ID NO: 742 - DNA, 1956 bp, synthetic construct
  source 1..1956: mol_type = other DNA
atggactacaaagacgatgacgacaagtacccctatgatgtacctgattatgctgccagcaatttcacacagttcgtccttgtagacaacggcggcaccggggatgttacagtggccccgagcaatttcgcaaacggcgtagccgagtggatctcctctaatagcagaagccaggcttataaggttacatgctctgtaaggcagtcttccgcacaaaatagaaagtacacaatcaaggtcgaagtgcccaaggttgctacacagaccgttggtggagaggagttgccagtggctgggtggcgctcctacctgaatatggagttaacaatccccattttcgctaccaattcagactgtgaactcattgtcaaagctatgcaaggtcttcttaaggatggtaacccaattccaagtgcaattgctgctaattcaggcatttattctggcggcagcagcggcggctcaagcggaagtgaaacacctggaacttccgaaagcgctacgcctgaatcttctggtggatcttctggcggatcttccgcatgcatgaggtcacaagagggaagacggcagcagaaagctcctgagggcgcgtacttgtgggaagagatggtgaagccatggggtactactggaggaccaagcccgtcttccgctcagggaggcgcgacccctcgcggggggcagggcagtggtttgatggagcaggtggttgagaggagcaacatgctggctgcgctgcgtcgggttgaaagaaatggaggcgcaccgggagtcgacggcatacccaccgagaggctccgcgatcagattcgagccgagtggccaagaatcagggaagaacttcttgccggcacttaccgccctaaaccagttcgccgagtggaaatcccgaagcctggaggaggcaagagactgctgggtatccccacagcggtagaccgccttatccaacaagctctcctccaggtgctgactcctatctttgatcctcaatttagcgaagcctcttatggcttccgacccggcagacgggcccatgacgccgtgaggaaggccagacaatatgtcgaagagggttacgagtgggccgttgacttggatattgagaagtttttcgatcaggtgaaccatgacattttgatggcccgggtcgcgcgaaaggtgactgataagcgcgttctgactttgatccgcaggtatcttcaggcaggtgtcatggtcaacggcgtggttatcgagaccggggaaggcactcctcagggtggtcccttgagccccttactggcgaatatccttcttgatgaccttgacaaggagcttgaaaaacgggggcacaaattcgtgaggtacgcagacgactgtaatatatatgttaagagcaagcgcgctggggaacgagttatggctagtatcagaaaattcctgcaggaacggttgaagcttaaaattaacgagcagaagtctgccgtcgatcggccctggaagctgaaattcctgggtttctccatgcataaacgtaaaaccggtgaaattctcattcggcttgctccccaggctatagagcgtgttaaaggcaaaatccgggagattacagcacgaaacaagcctgtaagtatggccgagaggatcgaacgactgaatacatacttaggaggatggatcggttattttgcattggccgagacccccagcgtctttgaggagatcgaagggtggatgcgacgacggctccggatgtatttgtggaagcagtggaagcgggtccgtactcgctatcgcgaactcagagctcttggcttatctgaatgggtcgtgcaccagttcgctaacgcccgtaaaggtccctggcggatggcccacgggcctatgaatcgagccttaggcaacgcctattggcaaagccagggtcttatgtcactgaccgagcgataccagagcctgcgacaggcttga

SEQ ID NO: 743 - DNA, 1917 bp, synthetic construct
  source 1..1917: mol_type = other DNA
atggactacaaagacgatgacgacaagtacccctatgatgtacctgattatgctgccagcaatttcacacagttcgtccttgtagacaacggcggcaccggggatgttacagtggccccgagcaatttcgcaaacggcgtagccgagtggatctcctctaatagcagaagccaggcttataaggttacatgctctgtaaggcagtcttccgcacaaaatagaaagtacacaatcaaggtcgaagtgcccaaggttgctacacagaccgttggtggagaggagttgccagtggctgggtggcgctcctacctgaatatggagttaacaatccccattttcgctaccaattcagactgtgaactcattgtcaaagctatgcaaggtcttcttaaggatggtaacccaattccaagtgcaattgctgctaattcaggcatttattctggcggcagcagcggcggctcaagcggaagtgaaacacctggaacttccgaaagcgctacgcctgaatcttctggtggatcttctggcggatcttccgcatgcatgggtgaggtgagggtgaagcccgggggcactcctagagggcgcagcatcgaccggcaggatctgaaactcattctgcggcgggagaagtacagaatggacttaatggaacagatgctttccagagagaatatgttgcaggccctgcgcagggtggaagcaaacaaaggggcagccggtatcgactccgtatcaactaggcagctgagggcacacgtggtccagcactgggaaacaactaaggcgaaactgctggccgggacatataagccctcacccgttaggcgcgttgagatacctaagccagatggcggtgtacgactgttaggaatcccaactgtgatggatagactcatacagcaggctatccttcaggtcctgacaccaatcttcgacccaacattttctcctcattcttatggatttagacccaaacgacggggccacgatgccgttcgccaggcacaggagtatattcgggaggggtaccggtacgttgtggacattgatctggaaaagttcttcgaccgagtcaaccatgatatattgatgtcccgggtcgcccggaaggtgaaagacaagcgagtgcttaagctcattagggcatacctcaaagccggcattatggccgagggaatccgagtcagatctgaagaaggtaccccgcagggtggtcccctgtccccccttctcgccaacatcctcctggatgacctggataaggagctcgaaagaaggcaactgcggttcgtgcgttatgctgacgattgtaatatctatgtcaagacccgcagagctggggagcgcgtgaagcggtccattacaaagtacctggagaaaaaattaaaactcaaggtcaatgaagcgaagagtgccgtggaccgtccttggaagaggaaattcctcgggttctcttttacgtttcataaggaagcgcggatcaggatcgcgcctaagtccctgaaaagggtgaaagacaaaattcggagtctgacaaggggtaatcacctgacctccatggaaaccattatcgaggacttgaatagatacctgatgggttggatggggtattacgcccttatggacaccccatctacattaaaagcccttgatgagtggatccgtcggcggttgaggctggtcctttggtctcgttggaaacgcgtccgaacaaggtatcgcatgttacgggctttggggctgcccgaacgcgatgttcacaagcttgcgaatacacgcaagggcgcgtggagaacttccaaaaccccccagatgcataaagctctcggtatagcgtattggaagagccaagggctcatgtccctcaccgaacgatatttcgaaatcagacagggttggaggacagcatga

SEQ ID NO: 744 - DNA, 1953 bp, synthetic construct
  source 1..1953: mol_type = other DNA
atggactacaaagacgatgacgacaagtacccctatgatgtacctgattatgctgccagcaatttcacacagttcgtccttgtagacaacggcggcaccggggatgttacagtggccccgagcaatttcgcaaacggcgtagccgagtggatctcctctaatagcagaagccaggcttataaggttacatgctctgtaaggcagtcttccgcacaaaatagaaagtacacaatcaaggtcgaagtgcccaaggttgctacacagaccgttggtggagaggagttgccagtggctgggtggcgctcctacctgaatatggagttaacaatccccattttcgctaccaattcagactgtgaactcattgtcaaagctatgcaaggtcttcttaaggatggtaacccaattccaagtgcaattgctgctaattcaggcatttattctggcggcagcagcggcggctcaagcggaagtgaaacacctggaacttccgaaagcgctacgcctgaatcttctggtggatcttctggcggatcttccgcatgcgtcgacaagggccgaatgcagaaaatatctaaggatacctggctccagaaggacagggccgagcctgattcatatgctgccgggcagaccttcatgagaatcacagagaacaaccttactgacgtcacaacgttggaggacggcctgctggaacagatcctcagccctagcaacctgaaccgcgcatataagaaagtgcgaagtaataaagggaagggtggagtggacaagatgggaattgagcatttgcaggactatttggttgaaaaccgggtcgaactgctgcagtcaataagggatggtaaatatagaccgaagcccgtgagacgggtcacaattccgaaagagaacggaaagaaacggctccttgggctgccaactgttgtggataaagtgattcagcaggcaatcacccaggtcctgtctcccatttatgagaagcagttcagtgcatacagttacggtttccgacctggccggaatgcccaccaagctttgaaaaaatgccgggattatatctccgacggccacatctacgctgtagatatggatctgcaagaattttttgataaggtcagccactctcggctcgtggaaatcctttcccgcaccataaaagatggaagagttatctctttgattcataaatacctgagagccggcgtgatgattggtaataagtttgaggaaactgagctcggagtgccccaagggggacctctgtccccactgctgtccaacatcatgctcaacgaactcgacaaggaactgcaacgcagggggcacagattcgttcggtacgcagacgatctcatgattgtgtgtaaatctaagcgctctgccggcaggacactgaggaatattataccctttattgaggataagttgttcctgaaagtgaaccgggagaaaactaatgtaagtcacgtttccaagatcaagtttcttgggcacaccttctaccgatcacatggaaaaggacggtttcgagcccacccaacatcaattagaaaaatgaagcaacgccttaagcagcttacttcaaggtccaatggctggggcgaagatcagagaaaagagagcttgaatcattacgtcagaggctgggtgaattacttcaagatggctgacatgaagagcctgctccgcaaaatagacagatggtatcgcaggaggcttagaatgtgcatttggaagcagtggaagcggatccgaactaagggcaagatgctcatcaagctgggtctcaataaatggaaagcttgggaatacgctgacaccaggaaaagccattggcatatagcaaatagtttcatcctgaccaggacgatcacaacccacagactgaggcaggccgggtatccatttttgcttgactactatagcaaagtacgcacagatatctga

SEQ ID NO: 745 - DNA, 1968 bp, synthetic construct
  source 1..1968: mol_type = other DNA
atggactacaaagacgatgacgacaagtacccctatgatgtacctgattatgctgccagcaatttcacacagttcgtccttgtagacaacggcggcaccggggatgttacagtggccccgagcaatttcgcaaacggcgtagccgagtggatctcctctaatagcagaagccaggcttataaggttacatgctctgtaaggcagtcttccgcacaaaatagaaagtacacaatcaaggtcgaagtgcccaaggttgctacacagaccgttggtggagaggagttgccagtggctgggtggcgctcctacctgaatatggagttaacaatccccattttcgctaccaattcagactgtgaactcattgtcaaagctatgcaaggtcttcttaaggatggtaacccaattccaagtgcaattgctgctaattcaggcatttattctggcggcagcagcggcggctcaagcggaagtgaaacacctggaacttccgaaagcgctacgcctgaatcttctggtggatcttctggcggatcttccgcatgcgtcgacagaggcgtgaagcccacgatggaaaagaaactcactaagatgaaagtgtctaaccaaagtggttataccgggttctccattttctctctcggggaaatctgtctcgaggaggtgaccgatgggtacaatctcgaaaaagcactgaaatgcgtagcccggaacaaaggagcccccggcatggatggcgtagagacaaaagactatgccctgcaccggcagattgcagggttcaaggatctgattgacgatatatcagctggcacttaccggcctaagccagttaaacgagtgtacataccgaaagaaaatggggataaaaggcctctgggcatacccaccgtggaggacagagtggtacagcaggcccttgccaatatcctgagcaagtattatgaggaagagttttccgacaattcattcggataccgcccaggaagaggttgccgccaggccgttaaaagggcattgaagtatgttaacggcggaagacaatgggttattgatctggatctgagtaagttcttcgacactgtgaatcatagtaagcttctgcagatccttagcgagaagattaaggacgggagggtgatcagtcttattcacaaattcttgaggacaccgatctacgagaacggcgtggtcagtcctaagagcaaacaaggcactcctcagggaggccccgtctccaccatactcgcaaacatcatccttaacgaatgcgaccagatgatggataaggagaatattaaattcgtcaggtacgcagacgacatgatgatattttgtaaatcaaaggaggccgccgagagaacactgaataaggtgactaaatttctcgagaaaacactctttctgactgtcaacaaggaaaagacaaaaatcttgtggtacacccatggaacgcagtttctggggtttacactttcccagtacgtgccaaagcatattaagaaaatcgctccaaagtgtaaggtctatgttaaggtccaccctaaaaagcgagagaaatttcagaagggaattaaagaaacactcgacagaagagctcccgggggtatcgaagagacgaagaaaaagttcaatcaaaagattcggggctggttcaactactttaaaggttccatcccccaaaagtggatggaggaaaccgatgcctggatgaggaggcgcatccgccagatgtattggaaacagtggaagactccacagaatagaatggaaaatttttccaaactgaatccaaaaagccctagccgccgagattacgcttattctaataactcttactggcggatggcacgaaccaagcagatgcacaacgctctgtctaaccggaccttgacaagcatgggttggctgtcactgcaggaattgaacgctcaatatctccaggaaatgtcaggaaatgatatctga

SEQ ID NO: 746 - DNA, 1830 bp, synthetic construct
  source 1..1830: mol_type = other DNA
atggactacaaagacgatgacgacaagtacccctatgatgtacctgattatgctgccagcaatttcacacagttcgtccttgtagacaacggcggcaccggggatgttacagtggccccgagcaatttcgcaaacggcgtagccgagtggatctcctctaatagcagaagccaggcttataaggttacatgctctgtaaggcagtcttccgcacaaaatagaaagtacacaatcaaggtcgaagtgcccaaggttgctacacagaccgttggtggagaggagttgccagtggctgggtggcgctcctacctgaatatggagttaacaatccccattttcgctaccaattcagactgtgaactcattgtcaaagctatgcaaggtcttcttaaggatggtaacccaattccaagtgcaattgctgctaattcaggcatttattctggcggcagcagcggcggctcaagcggaagtgaaacacctggaacttccgaaagcgctacgcctgaatcttctggtggatcttctggcggatcttccgcatgcgtcgacgagcttctcgagcagatccttagtaattctaacctcaacgaggcatataagaaagtctaccggaataaaggagcctctggcgtggatggagtcactataaatgagctgaaagaatacctccagaacaacaaacacaagctgctgagtgaaattcgggctcgcaaatataaaccccagcctgtgaagcgagttgaaattcctaaggcctccggaggggtgcggaagttggggatccctacagttgtggaccgagttattcaacaggccattaatcaagttctgacaccaatttatgaggagcagttttcagaatcttcctacgggttccgccccagacggagcgctcagggtgccgttcttagatcacttgagctgatcaatgatggatacgactgggtggtggacattgacctggaaaggttctttgatactgtgcatcatgatagactcatgaacatcatatctcggaccatcgaggatggggacgtcatatcccttattcggaagtttctcgtaagtggcgtcatgatcgacaataagtatgaagacacaattatcggaacaccccaaggtggaaatctgtcccctttgctgtctaatatcatgttgaatgaactggataaagaacttgagatcagggggctggacttcgttcgctacgctgatgattgcatcatacttgtcagcagcaagaagtctgcaaatagagtcatggcatccgttaccaacttcatagaaaaaaagctgggtttgaaggtgaacgtaacgaaatccaaggtagacagaccgaataacataaagttcctcggctacggctactattatgacggcaaagagggtaaatatcagctcaggccacatgagaagagcatccagaaatttaaaagaaccctgaaaagactgaccaaaagatcatggtctgtgagtttgaactaccgcctttttaagattcgacaagtcatcatgggatggattcaatactttaagtatgggaagatgaagagcaagctgaaagtaatcgactcaaaactgagggctaggatacgaatcgtgatttggaagcagtggaaggtgccaaagaagcagattaactcactgatgaagctggggattagcctcgatgaagccaagggcattacttactgtcgcaaaggttatcagttcatcggccacagtaaagtgatccagaaagccattaataacagcaggctcaagaaaaggggcctcacttccgcattggatcactacctgaaagtgcagaccgtgatcgatatctga

SEQ ID NO: 747 - DNA, 1827 bp, synthetic construct
  source 1..1827: mol_type = other DNA
atggactacaaagacgatgacgacaagtacccctatgatgtacctgattatgctgccagcaatttcacacagttcgtccttgtagacaacggcggcaccggggatgttacagtggccccgagcaatttcgcaaacggcgtagccgagtggatctcctctaatagcagaagccaggcttataaggttacatgctctgtaaggcagtcttccgcacaaaatagaaagtacacaatcaaggtcgaagtgcccaaggttgctacacagaccgttggtggagaggagttgccagtggctgggtggcgctcctacctgaatatggagttaacaatccccattttcgctaccaattcagactgtgaactcattgtcaaagctatgcaaggtcttcttaaggatggtaacccaattccaagtgcaattgctgctaattcaggcatttattctggcggcagcagcggcggctcaagcggaagtgaaacacctggaacttccgaaagcgctacgcctgaatcttctggtggatcttctggcggatcttccgcatgcgtcgacgagctcctggacaaaatactggagcgggagaatctgaacaaagcatataagcacgtgaaggctaataagggagcacctggggtggatggcgttacggttgatgaagcatacgaaaatattcgacagaataaggagaaatggctgcatcagattcgcaaaaggacctacaaaccccaacccgtccgcagagtccagatcccgaaagaaaatggtaaaatgcggaatctcggtataccaaccgtttttgacagaatcatccaacaagccatggtgcaggtcctgagtccaatttttgaagaacagttcagtgaaacatcttacggctttaggcctgggcgatgttgcgagaatgcagtggttaaagctcttgagtatctgaacgacggatatgaatggatcgtggatattgatttggagcggttctttgatactgtggatcaggaccgactgattaatattattatgaggacaatcaaggacggggacgtggtttccctcatcagaaagtacctctctgctggagtaatggacaaaggagttactaaagccaccgagaaaggaacgcctcagggcgggaacctcagccccttgctttcaaacattatgcttaacgaactggataaggagctggaggccagaggactgaggttcgtgcggtatgctgacgattgcattatcctcgtgaagtcagagaaagctgctaaccgggtactggagagcataaccaagtacatagaaaagaaactgggcttgaaagtcaacgcagaaaagagcaaggtaacccgcccaactaagactaaatacctgggttattcattctggaaagacactaagggcaaatggaaaccaaagccccatcttaagagctatcagaagatcaagcggaaattgaagcaactcacatgtagaagaatcagtatctcccttgacgaaagaatcaaacagattaattatgccattaggggctgggtaaactacttcaggatcgcaaacatgaaaaacgccatacaggagattgatgagcacttgcggaccagggtccgcgtgattatctggaagcagtggaagaaagcctctcgaaaggaaaaagctctgctgcaacttggcgtgaagcctgatatagctcacaatttggccaacacatccaagggttatcagcttgtggccaagacagattggcttaaattcgccattaatatcgaacgccttagaaagcgcgggcttatctttctctccgaccagtaccagaaggtgcatgtcgagatagatatctga

SEQ ID NO: 748 - DNA, 1947 bp, synthetic construct
  source 1..1947: mol_type = other DNA
atggactacaaagacgatgacgacaagtacccctatgatgtacctgattatgctgccagcaatttcacacagttcgtccttgtagacaacggcggcaccggggatgttacagtggccccgagcaatttcgcaaacggcgtagccgagtggatctcctctaatagcagaagccaggcttataaggttacatgctctgtaaggcagtcttccgcacaaaatagaaagtacacaatcaaggtcgaagtgcccaaggttgctacacagaccgttggtggagaggagttgccagtggctgggtggcgctcctacctgaatatggagttaacaatccccattttcgctaccaattcagactgtgaactcattgtcaaagctatgcaaggtcttcttaaggatggtaacccaattccaagtgcaattgctgctaattcaggcatttattctggcggcagcagcggcggctcaagcggaagtgaaacacctggaacttccgaaagcgctacgcctgaatcttctggtggatcttctggcggatcttccgcatgcgtcgacaacgctgaaaacctcattgacgagagttgcccacagcgaacctctgctgaacatgagaagtacgcaggcgcacaatctgctgctccccgagaatcagaagctgaggatagggccgacctgctggaacgaattttggatcgcgataacatgaatgaggccttcaagagagtgagggccaataagggtgccccaggcattgatggcatgaccgtggaagctgcacttccctggctgattgaacatggaaaggagctgatcgattctctcagagacggtacttataaacctcagcctgtgagacgcaaagagatacccaagccagatggtgggatccggaagcttggtattcccactgtgatcgatcggatgatccagcaggccatcacacaacagctgacacctatctacgagccgatttttagtgacaattcctacgggtatcgccctcataggaatgcacagatggccattagaaaggctaaggagtacgctgacgaggggtataccgtcgccgtggaaatcgatttgacgaagtatttcgacacacttaaccacgaccttttgatgaacactgtcagagaggaggttaaggacaagagagtcttggagctcataaaaaaataccttaagtccggagttatggctaatgggctgctgattaaaacggaagagggatccccacaaggcggcccgctgtcacccttgttggcaaatatttacctgaataaatatgaccacgaaatgacccggcggggagttaaggagatcagatacgctgatgacatagttctcttcgcaaagagtaagagagctggagaacggctgttggagagcagccgacggtatcttgagaagaaactcaaactgaaactgaacagtgaaaaatccaaggtagtctcaacctatagtcctcgcaaatttaaattcctgggctatgctctgggcaaatctcggcaggggaccttcatcaggatccatgctaaggcccttaagaaagccaaggagaaacttaaggaacttactagccggtcccagggaagaaaaatctgcgaagtgtttgcccggttgaagcggtttgtgaacgggtggataaactattttggtatcgctcgcataaaaaagactctcgaggactgggatgggtggctgcgccgaagaattaggatgtacatttggaaacagtggaaaaagacacgcaggcgaaaagaaaatcttatgaagcttggagtaccagagtggagggcctgtgaggcagcctacagcaggaaagcctactggcgcagcgccaaacacgcatcagtgcactccgccctgacaaatgaaaggctcgcaagagcaggctactacagcctgtctgaaaggtatgagtcactccacctctatgatgatatctga

SEQ ID NO: 749 - DNA, 1935 bp, synthetic construct
  source 1..1935: mol_type = other DNA
atggactacaaagacgatgacgacaagtacccctatgatgtacctgattatgctgccagcaatttcacacagttcgtccttgtagacaacggcggcaccggggatgttacagtggccccgagcaatttcgcaaacggcgtagccgagtggatctcctctaatagcagaagccaggcttataaggttacatgctctgtaaggcagtcttccgcacaaaatagaaagtacacaatcaaggtcgaagtgcccaaggttgctacacagaccgttggtggagaggagttgccagtggctgggtggcgctcctacctgaatatggagttaacaatccccattttcgctaccaattcagactgtgaactcattgtcaaagctatgcaaggtcttcttaaggatggtaacccaattccaagtgcaattgctgctaattcaggcatttattctggcggcagcagcggcggctcaagcggaagtgaaacacctggaacttccgaaagcgctacgcctgaatcttctggtggatcttctggcggatcttccgcatgcgtcgacgttaggtctcgaaaagaaaggatgagagaggaggataagtcacggccaaatactaggctttgtgaacagcttatctccctggctaatatccaacaggcagtcaagaaggtgatgcagaacaaagggtctgcaggcattgacggtatggaggtcaccgagttgccaagttaccttgaggctaactgggccctgatacgcgagcagattgtgacccgcacctacaagcctaaacccgtactcagacgcgagattcctaaggacaatggcggtatgaggttgctgggaatccccacggctgttgatcgggtgattcagcaggctttggtgcaagtcttgacaccagttttcgagccaaccttcagcgatttctcttacggattccgacctgggcggtcagctgaagatgccgtccggctcgcccagacatatatgtcagaagggtataaacatgtggtcgatcttgacttgagtaaatttttcgacactgttgaccatgacatcctgatgggcctcatcgacaaacacatggatgataaagatgtaaggcggttgatttatgtgtatctgaagagcggagtcatgactaatggctctatggccgtgactgctctgggtacaccgcaaggaggtcccctcagtcctctgctctccaatgtgtacctgactccgtacgaccgggaattggaaaaacggggtctgagatttgtgcgatacgccgatgactgcaacatctttaccaagagcaaaatgtcctcatatcgcgtccgagactcagccaagagttacctggaacgaaagctgaagctcaaagtgaatatggagaagacagaggcccgccgcgcagtgggatccaccttcctcgggtttacctttagaacgtatggcaaaagggggaagcttggaatgacagttccccacgaaaagaagctgaagaagcttgaagataggattaggctcgttactaaacggaatagaggggtaagcatcggcatggtgattagagacctcaacagcattctgagagggtgggtgggctacttcgcaagatctgcaatcaaaaactatctcgaacgactgatggaatggatccgcagacggataaggcaatatctgtggaaacagtggaaaagcggcaaaaatcgaaaacataggctgagacagcttggcgtggatgagtggaagctgaaaaagtggaagctcggaagcaattcctattggaagatggcagggacaatgaactacctcatcgataaggagtccatacacggaagatacggcctggttgacatattgggttactataacaaactccacgcccagaggatggagagtgacggcattgtccttgatgtacgctacaactctctgtttggagatatctga

SEQ ID NO: 750 - DNA, 1860 bp, synthetic construct
  source 1..1860: mol_type = other DNA
atggactacaaagacgatgacgacaagtacccctatgatgtacctgattatgctgccagcaatttcacacagttcgtccttgtagacaacggcggcaccggggatgttacagtggccccgagcaatttcgcaaacggcgtagccgagtggatctcctctaatagcagaagccaggcttataaggttacatgctctgtaaggcagtcttccgcacaaaatagaaagtacacaatcaaggtcgaagtgcccaaggttgctacacagaccgttggtggagaggagttgccagtggctgggtggcgctcctacctgaatatggagttaacaatccccattttcgctaccaattcagactgtgaactcattgtcaaagctatgcaaggtcttcttaaggatggtaacccaattccaagtgcaattgctgctaattcaggcatttattctggcggcagcagcggcggctcaagcggaagtgaaacacctggaacttccgaaagcgctacgcctgaatcttctggtggatcttctggcggatcttccgcatgcgtcgacgaactcatagaggtcatactgtccaaggaaaacctgaatagagcttacaaaaaggtcgtagcaaataagggtgcctccggggtggatggtgtcggggtggaggaactgggagattacattcgggaaaataaagacgttataattacaagcatcagaaacaggacctacatgcccaaacctgttcgccgggtgtacatcccgaaagaaaacggcaaacagcgcccacttggtattccaacggtactcgataggactattcagcaggctatcgcccaacctatttgggacatatacgaagaaattttcagcgagtactcttatgggttccgccctggccgaagttgccatgacgcaattcgccaggccctgtattatctcaacgatggctatgagtgggtggtagacatcgatattgagcagtttttcgataaggtcaaccacgacaagcttatccagatactgggggagcaggtcaatgattctacaaccttgaacctcatcagaaagtacctcaaggcaggagtcatggagaagggccttgaaaaagccacaattaccggcgtaccgcaagggggcccactgtccgtggtgtgttccaatatctatctggataaactggacaaggagttggagaagcggggcctgagatttaccaggtatgctgacgatgtcttgatctttactaagtctgagatggcagctaatagagtgatgaaatcaataaggagctggctcgagcgaaaattgttccttaaggtgaatggtactaagacaaaagtggtgcgccccacgcgcagtaagtatctcggctttactttcgtgaaaaattccactgagtggaaagttagacctaccaacgaaaagaagaagaaattgaagaaaaagctgtcagagtacctgaaacggggaaaagccgtggccaggccccttgctgtcacaattaagagagtcaacgaaattgtgcggggatggatcaattactttaggatcggaatgatgaaacagttcatgcaagaattgggagagtggctgcgacacaagattagggtgatcgtagtgaaacagtggaagagacccaagaccatttacaggaatctgtcttacctcaattggaagtataagatcggatgcaaacaagaagagatctttaaagttgccaactcacggttggggtggtatagacgatgtggcatgagcgtggtgaacttcatcataagtaaggaccttctggaaaatcggattaaagacggggttggactcctgaacccattgtcatactatctggttaaagttggtatcgatatctga

SEQ ID NO: 751 - DNA, 1974 bp, synthetic construct
  source 1..1974: mol_type = other DNA
atggactacaaagacgatgacgacaagtacccctatgatgtacctgattatgctgccagcaatttcacacagttcgtccttgtagacaacggcggcaccggggatgttacagtggccccgagcaatttcgcaaacggcgtagccgagtggatctcctctaatagcagaagccaggcttataaggttacatgctctgtaaggcagtcttccgcacaaaatagaaagtacacaatcaaggtcgaagtgcccaaggttgctacacagaccgttggtggagaggagttgccagtggctgggtggcgctcctacctgaatatggagttaacaatccccattttcgctaccaattcagactgtgaactcattgtcaaagctatgcaaggtcttcttaaggatggtaacccaattccaagtgcaattgctgctaattcaggcatttattctggcggcagcagcggcggctcaagcggaagtgaaacacctggaacttccgaaagcgctacgcctgaatcttctggtggatcttctggcggatcttccgcatgcgtcgacgatgccgagcgccagcagggacgggcctatcaacttacattcaattttgagggggacgctgagacgttgcgccatgatcagggcggagatgatgggattggcaccgctcgaccagaggagcctcagaccagcacggcatctgatcccgcaagagcactcacagagagactgatggaggaggtcacccgcccagagaacctgaatagggcttaccgaaaagtgaaagccaacaagggagctcccggagtggatgggatgaccataggtgaccttagagcctggatcgctatgcacaaagaagaactgatcgcttcacttttggatggatcctatcggcctcagcctgtccgcggggtgcaaatccctaaacccggaggaggagtaaggcagcttggtattccaacagttgtggacaggcttgtgcaacaggccatccttcaggttctggaacctctcttggaccccaccttctcaccgtcaagtttcggcttccggcccgggcgcggtgcacatgatgcacttaagcaagctagacagtacgtggccgacgggagggtgatagtggtggatgtagacctggaaaagtttttcgacagagtaaatcacgatattctgatggcaagactggccaggaaggttgccgatcgaaggttgctggggataatccgcaggttcctccaggctggccttatgcaggaaggtgtctgcgtggcaagacatgaaggcactcctcagggtggcccacttagtcccctgctggctaacctccttttggatgatctcgacaaggaactcgagagacggggccaccacttttgtcggtacgcagacgattgtaatatttacgtgcagagtaaggccgcagggcaacgggtccttggcagcgttacacggtttctcgaggtggtcctgcgattgagagtcaaccgagacaaaagcgaggttgcctatatcgaagaacgcaagttcctgggctataggcttctgtccggtggacgattgggtatcgccccgaaatccttggaacgcgctaaggaccgaattagacagatcaccaggcggaatcgaggcgttagcgtagacagaatgacatctgaactgaacagttttctcactggctgggtttcatacttccggcacgctgcctgtaagtctcatctgactgagctggacggatggattcggaggaagttgaggtgcgtgaggctcaagcattgcaaaagatctaaaacactggcagactttctgggatcccacggagtcgcacaacacactgcttgggtgaccgccttgtctggcaaaggctggtggcgactgagcgggagcccagccgcccaccaggctatggaccagcgctggtttgcttccttggggctgattaaccttgcccatcggcatactactctcaatagagatatctga

SEQ ID NO: 752 - DNA, 1956 bp, synthetic construct
  source 1..1956: mol_type = other DNA
atggactacaaagacgatgacgacaagtacccctatgatgtacctgattatgctgccagcaatttcacacagttcgtccttgtagacaacggcggcaccggggatgttacagtggccccgagcaatttcgcaaacggcgtagccgagtggatctcctctaatagcagaagccaggcttataaggttacatgctctgtaaggcagtcttccgcacaaaatagaaagtacacaatcaaggtcgaagtgcccaaggttgctacacagaccgttggtggagaggagttgccagtggctgggtggcgctcctacctgaatatggagttaacaatccccattttcgctaccaattcagactgtgaactcattgtcaaagctatgcaaggtcttcttaaggatggtaacccaattccaagtgcaattgctgctaattcaggcatttattctggcggcagcagcggcggctcaagcggaagtgaaacacctggaacttccgaaagcgctacgcctgaatcttctggtggatcttctggcggatcttccgcatgcgtcgacaaatccggcggcgaatggcggcaacagttgctgccattcgaggccgaagctcctactgggggcgctggacaaaattctgccggacctgctggcgtctcaagggccccttggcgccaacccgaccctgccagcgctagacctacattgttgcgagagatcgtgagggaacgggtgttggaggcagcatggaaacaggtgcgccgcaatagaggagctccaggtattgacgggatgcgggttggcgatttcgaggagtggataggggtccacggcgatcaggtcagggccgagatcctggcagggacctacgaaccacagccggtgaggagggtcgagatcccaaaacccggcgggggcgtgagattgcttggcgtgccgactgtcctggatcgcgtgattcagcaggccctggtaattgtgctcaccccaatccttgaccccaccttcagtgaatccagctatgggtttcggccagggagatctgcccatggcgccgtggcagccgcccgaagacacatcgctgacggttataggtgggtcgttgatcttgatctgtccaagttctttgaccgggtaaaccacgacgtgctggttgataggttgtggaagcggcttggcgacggtcctctcctgagccttatacggagatatttgaaggcaggagtgctcattgaaggagtagtggtggaatctgttgagggcaccccacaagggggtcccctcagtcctctgctgtccaacgtactgctcgatgaatgggatagggagctggaaaggcggggacatcggtttgtgaggtacgctgatgactgcaatatttatgttcgatcacggcgcgctggcgaaagagtccttgcttcatgtcgagacttcctggagcgcagactgcgcctgaaagtgaacgaggaaaaaagtgcagtcgcacgaccctgggcaagacagtttctgggatacagcgttacaaacggaaagaaacctaagcagcgcctggccaaacgatctgttgttcgcctgaaggagcgagtccgggccattacgtctaggagcaggggtatatccttggaacagatgttgcgcgagcttagtcgatacttgcgaggctggagtggttactttcgcaggattgaaacaccctctgtcttggagcagctggattcctggatcagacgaagggtgaggagctttcttttgaagcaatggaaacccggaagaggaagaagacgggctatccagaagctcggagtggacgacgggtggcgactgtcagcctccagaaagggtccatggagactctcacggggaaaggtgatcagcgcagctttgcccaatgccactctcgaacagcgcgggctcgtaaatctgaaacaggagtggaagagactggccgagctcttcgatatctga

SEQ ID NO: 753 - DNA, 1842 bp, synthetic construct
  source 1..1842: mol_type = other DNA
atggactacaaagacgatgacgacaagtacccctatgatgtacctgattatgctgccagcaatttcacacagttcgtccttgtagacaacggcggcaccggggatgttacagtggccccgagcaatttcgcaaacggcgtagccgagtggatctcctctaatagcagaagccaggcttataaggttacatgctctgtaaggcagtcttccgcacaaaatagaaagtacacaatcaaggtcgaagtgcccaaggttgctacacagaccgttggtggagaggagttgccagtggctgggtggcgctcctacctgaatatggagttaacaatccccattttcgctaccaattcagactgtgaactcattgtcaaagctatgcaaggtcttcttaaggatggtaacccaattccaagtgcaattgctgctaattcaggcatttattctggcggcagcagcggcggctcaagcggaagtgaaacacctggaacttccgaaagcgctacgcctgaatcttctggtggatcttctggcggatcttccgcatgcgtcgacggcgacacaatgactaagcggaaacaccattcactgtacggccagattctccagagactggacactgctttcgcaaaggtgaaggcaaacagaggagccgcaggaatcgatggcgaaagtatcgccgaatttgagcaggatctcgaagccaatttggcacaacttaagagagacctcaaggagaagacatatgctcctcagccagtgcggcgagtctatattcctaaggcttccggtggtcagagaccactcggcattcctacagtcagagaccgggttgtgcagcaggccctgagactggtgctcgagcccgtgttcgaaccgctcttttgcgatagcagctatgggttcaggcctgggcgcagtgcccatcaagctctggatagggtcagcggccatttgagagagggttacaagtgggttgtggattgcgatctgaaatcttattttgatactatcccgcaggaggcccttattgaccgggtcgccgaggaagtcgccgatggcactgttctgaaactcatcagatcttttctgcaagctggagtaatgtctgaagggcagttgcagagaaccatagctggcacgccccagggtggtgtgatctcaccattgctcgccaacatctaccttcacggctttgatcagctcatggaggacagaggactgcgacttacaaggtacgctgacgacttcgtgatcctttgtcgaacccagagagcagcagaacgcgtgatgggtaatgtgcagtcttatcttgaaggccaactggggcttaccgtcaatcgcgagaagagcaaggtggtgcatttgtccgaagggttcgtattccttggatacgagtttgggacgtggggacgaaggcccggaccaaaggctattctgaggtttaaacagcggattagagagctgactcgccggaatcagaccatacctgtagacaaaatggtacgcgagcagctgaacccttaccttcaagggtgggctgggtactttgggtatggccaagtgaggcagcgcttcctggactacgataaatggattcggaggaggctgaggatggtccaattgcggtcctggcgacacatgaaaggcctgcacagggcaatgcgacagaaaggatggaaaggtcccctgcccgccgtctatgttaatatgagacggtggaggtcaagtgttcacagccttgttaactatgccctgggacccgattggatacgcggcttgggacttgtgtcccttgttgacttccaccggccaaccatggtgaccgtaacacgcgatatctga

SEQ ID NO: 754 - DNA, 1716 bp, synthetic construct
  source 1..1716: mol_type = other DNA
atggactacaaagacgatgacgacaagtacccctatgatgtacctgattatgctgccagcaatttcacacagttcgtccttgtagacaacggcggcaccggggatgttacagtggccccgagcaatttcgcaaacggcgtagccgagtggatctcctctaatagcagaagccaggcttataaggttacatgctctgtaaggcagtcttccgcacaaaatagaaagtacacaatcaaggtcgaagtgcccaaggttgctacacagaccgttggtggagaggagttgccagtggctgggtggcgctcctacctgaatatggagttaacaatccccattttcgctaccaattcagactgtgaactcattgtcaaagctatgcaaggtcttcttaaggatggtaacccaattccaagtgcaattgctgctaattcaggcatttattctggcggcagcagcggcggctcaagcggaagtgaaacacctggaacttccgaaagcgctacgcctgaatcttctggtggatcttctggcggatcttccgcatgcgtcgacaagaagagaaaatggtacagtctggttgacaagatctggaaattcagtaacctcgaagcagctttcagcaaagtaaaagagaaccggggagccgcagggatcgacagagtgagcatcggccagttcgagaggcagaagcaacagaatcttttggagatccaaagacttctgaggagcaaacgctacgaggcaattccagtcagacgcgttgaaatacctaagagcgacggacggtatagacctctgggcattcctacggtcagagatcgcgtggtgcagcaggctacctttgctgttatgtcccctatttttgagacaaagtttctggactgttcttacgggtttaggaagggacgaaatacgcaccaggccattgccaaaatggaacaatacaggaatgagggctgcgagtgggtggtggaagctgatatagagtcattttttgacaccgttaatcacgagttgcttattgatcaggttgctgaggaaatctcagatggttcagtgcttaagcttattaggtcctggctgactgccggcgcatttaaaggaacagaagtgattgagacttctgtgggaacaccacaagggggtgtcatttccccgcttctcgcaaatatatatctgcacccattcgatgtacagatgacagccctgggcttcaagctggtgaggtatgccgatgatttcgtcataatgtgcagaagcgaggacgaggcagaacgggccatggaagccgctacccggatcctctctgggattaaactccgggtaaaggccgctaaaacccgaatagtgcagctgagtaaggacgacggaatcgaatttctcggtttcaccatcttcaaggaacataaggtcccccgaactagagctgtcgagaatttcaaatcacgcattcgcctgatcactcgaagacagaggcccgctacccttcaggagatcatcaaggaactgaatcccgtggtgcggggttggggaaactatttcaaaattgccaacgtaaactggctctacaaaggcttggattcttggatgcgaatgcgccttcggtcttttctcgagaagaagaagagctatgaagccaacaaaaggctggaaaacaaacattttagtgaagcaggcttgactacactgtcctccttgatcgggtacgatatctga

SEQ ID NO: 755 - DNA, 1938 bp, synthetic construct
  source 1..1938: mol_type = other DNA
atggactacaaagacgatgacgacaagtacccctatgatgtacctgattatgctgccagcaatttcacacagttcgtccttgtagacaacggcggcaccggggatgttacagtggccccgagcaatttcgcaaacggcgtagccgagtggatctcctctaatagcagaagccaggcttataaggttacatgctctgtaaggcagtcttccgcacaaaatagaaagtacacaatcaaggtcgaagtgcccaaggttgctacacagaccgttggtggagaggagttgccagtggctgggtggcgctcctacctgaatatggagttaacaatccccattttcgctaccaattcagactgtgaactcattgtcaaagctatgcaaggtcttcttaaggatggtaacccaattccaagtgcaattgctgctaattcaggcatttattctggcggcagcagcggcggctcaagcggaagtgaaacacctggaacttccgaaagcgctacgcctgaatcttctggtggatcttctggcggatcttccgcatgcgtcgacgcaagtccagccaccgagtgccccgctggacacagtgctgtcgctaccaaaagctccgccggacatagagtgggttttttcgccgctagaagggccgcaaagagccaaggacgaaggcagggccaggacggacaacagcggtcacctaaaccatctagcgggaatgccagggcagaagggccacggcgcgtgaagcgaaaggtttcctcactgatcgaccaggtgtacagatgggaaaacctctaccgcgcttggcgccggatcagaagaaacaagggagtgcatggcttggaccgagtcacaatccggaacttcgaggcagattgggagaaacacctccgagagattcagcgaatgctcatggagcagagatatgttccaactccagttaggagagtatacattcctaaacccgcagatccaaccaagaggcggcctcttgggattcctatagtggctgacaggattgtgcagcaggcaatctttcaagtcgtagaccctctcttcgacagcactatgtctgatcggagctttggataccgcaagggccggaaagctcacgacgccgtcgctgccctgatcagcgatgctaaacaggggtaccgcttcgttctggacgctgatatagccagtttcttcgacgagattgaccacgatgtggtgatgtcttgcgtgcgagcacgcatcgccgatggtagggtcttggatctgtttgaggcatttcttaaggccggggtcagtgaggacggtgaagtttctgtccccgataaaggtgtcccccagggaggcgttatatctccgtggctgtccaacctcgtgttggatcatttggacaaagccatcgagaaggaagggtggcgccacgccaggtacgcagacgatttcgtcgtgctttgtcggtcccgagaagaagcccagagggccctcaccgtggtaaaagaagtgttggaaacgctcaagctgtcattgcatgagactaaaacacgccttactgactgtgagcagggcttcgaatttctgggcttccactttcggcactatagactgggcattagggaatcctcaattgaaagatttaaggatagggtgcgggccctgacaagacggtggcaaggcagaaatgtggatgcagtgcttgcagatttgaatcccgtgctgagggggtgggctagatattttggcgtagccgaggttagtcttacatttagatatttggacagctggatcaggatgcgactgagaggcttcaagtacaaacggcgctgttatcatgataattggagactgccctcaaagcgcctcaagcggtggggtttgctgtctctgcagcagtgcaggccgcaactgcggctctcctatgctagagccgtaggacctgatatctga

SEQ ID NO: 756 - DNA, 1851 bp, synthetic construct
  source 1..1851: mol_type = other DNA
atggactacaaagacgatgacgacaagtacccctatgatgtacctgattatgctgccagcaatttcacacagttcgtccttgtagacaacggcggcaccggggatgttacagtggccccgagcaatttcgcaaacggcgtagccgagtggatctcctctaatagcagaagccaggcttataaggttacatgctctgtaaggcagtcttccgcacaaaatagaaagtacacaatcaaggtcgaagtgcccaaggttgctacacagaccgttggtggagaggagttgccagtggctgggtggcgctcctacctgaatatggagttaacaatccccattttcgctaccaattcagactgtgaactcattgtcaaagctatgcaaggtcttcttaaggatggtaacccaattccaagtgcaattgctgctaattcaggcatttattctggcggcagcagcggcggctcaagcggaagtgaaacacctggaacttccgaaagcgctacgcctgaatcttctggtggatcttctggcggatcttccgcatgcgtcgacgaggtgacacggagagacagagtcaaggccggcctgctcgagaatatcctcagtcgagacaatatgctggccgcccttaaaagggtgaaagctaataaaggtagccacggagttgatgggatgaaggtagacgagctcccggcctacctgaaagctgcctggcagacaattagacagtcacttctggacggcacgtatgtgccacagcctgtcaggcgcgtcgaaatgcctaagccagatggcggggtgcggctgttgggaatccctaccgtcctggataggttgattcaacaggcaatcgctcaaattttgtccgatatattcgaaccagggttttcttgtcattcatatggtttccggccaggaaaaggtgcccacgatgccattagagccgcccgcgattacattcgcgccggctacgactatgtcgtagacatcgatctggagaagttttttgatcgagttaaccatgacaaactgatggcacgcgtggcacggaaagtggatgacaaaagagttctcaagctgatacgccggtatctgaccagcggggtcctggtgaacggcgttcgcgtggcatccgaagaggggactcctcaagggggacccctcagcccccttctcgctaacatcctgctcgacgatttggataaggagctggaacgaagggggcttaaattctgccgctacgcagatgattgtaatatctacgtaaagagcaagagagctggtgaacgagtgatggcttcaattggaagatttattcgggaacggctttctttgaagataaacgagaacaagtctgctgtagacaggcccgctgccaggaaatttcttggattttctttctatcgcaaaaaggacgacgtgggcataagaatccatcccaagagtgtgaagagattcaaggagaaaattaggtccatcaccaatcgaaattggtcaatgagcatggacgaaagattccgcaggctgcatagcctgtgcgcaggatggattcggtatttcggccttgccgacgcaaagacccacatgagagaactggatgagtgggtcaggaggaggatcagagcttgcttttggaagcagtggaagcggatcaagactcgccacgacaacctcgtgaagttgggtgttgattccatgaaagcatgggagtgggccaacactcgcaaaaaatactggcggatagcaggctcttgggttcttgctaccacactgactaatcaggtgctcgaagacatgggcttccgaaatctctccaaactttacagtgagatgacatatagtgatatctga

SEQ ID NO: 757 - DNA, 1830 bp, synthetic construct
  source 1..1830: mol_type = other DNA
atggactacaaagacgatgacgacaagtacccctatgatgtacctgattatgctgccagcaatttcacacagttcgtccttgtagacaacggcggcaccggggatgttacagtggccccgagcaatttcgcaaacggcgtagccgagtggatctcctctaatagcagaagccaggcttataaggttacatgctctgtaaggcagtcttccgcacaaaatagaaagtacacaatcaaggtcgaagtgcccaaggttgctacacagaccgttggtggagaggagttgccagtggctgggtggcgctcctacctgaatatggagttaacaatccccattttcgctaccaattcagactgtgaactcattgtcaaagctatgcaaggtcttcttaaggatggtaacccaattccaagtgcaattgctgctaattcaggcatttattctggcggcagcagcggcggctcaagcggaagtgaaacacctggaacttccgaaagcgctacgcctgaatcttctggtggatcttctggcggatcttccgcatgcgtcgacgacggatccaagcttaaggtgaaaagcttcgagatcccgaaacgacttgtttatgaagcttgggaaaaagtaagagctaataaaggagcccctggggtagacgcagtctcaataaaccagttcgccgccgccgaagccgataatctgtacaaactctggaacagaatgagttctgggtcatatatgcctggggcagtacgcgctgttgagatccctaaggaccatgggctgggtgtcaggacactgggggtggcaaataccgcagatcgggtcgcccagactgctgcagccatgctgcttgaggagagactggaaccaatctttcatcccgacagctacggttaccggcccggaaggtccgcccatgacgctcttgctgtggcaagaaaacgatgctggtctcaagactgggttattgatctggacattagggctttctttgactctgtcccacatgatcttcttctgaaggccgttgcccaccacacagaagagcgatgggtgctcctttacattgagcgctggttgaaggccccaatgcagatgcctgacggcacccttgtggcccgggagcggggtactccacagggatccccgattagccctctcttggccaatttgttcatgcattacgcattcgacagatggatggcccgcgaccaccctggctgcccatttgagcggtatgccgatgacattgtcgctcactgcgattccaaagaacaagcctgttccttgctggccgctatcgccgagaggctgggagctgttggcctggagttgcaccccgataaaaccaaaatcgtattctgtaaggatgcaaacagacccggtacaagtgaacatactagcttcgattttctggggtacacgttccgaggaagactcgcaccaggccccagaggctacttcgtgtcattttcacccgctatgtcaacaaaggcaaagaaggccgtgggtcaaaaagttcgagcatggcaccttaaccgccgcaccggcaccgatttgtctggcctcgctgaagatataaacccacacgtgcgggggtggataaattattatggagctttttatcggagcgaactccacagtctggcacgcaggatcgacgagcatctcgtccgctgggctatgcataaatttaagcggctgagaggcaagcccagcagggcatgggattgggtggctgccgctaggcagagacagcctaagctgtttgctcactggcacctggtgtctagtactaggggcaggcttgtgggagccgtggatatctga

SEQ ID NO: 758 - DNA, 1806 bp, synthetic construct
  source 1..1806: mol_type = other DNA
atggactacaaagacgatgacgacaagtacccctatgatgtacctgattatgctgccagcaatttcacacagttcgtccttgtagacaacggcggcaccggggatgttacagtggccccgagcaatttcgcaaacggcgtagccgagtggatctcctctaatagcagaagccaggcttataaggttacatgctctgtaaggcagtcttccgcacaaaatagaaagtacacaatcaaggtcgaagtgcccaaggttgctacacagaccgttggtggagaggagttgccagtggctgggtggcgctcctacctgaatatggagttaacaatccccattttcgctaccaattcagactgtgaactcattgtcaaagctatgcaaggtcttcttaaggatggtaacccaattccaagtgcaattgctgctaattcaggcatttattctggcggcagcagcggcggctcaagcggaagtgaaacacctggaacttccgaaagcgctacgcctgaatcttctggtggatcttctggcggatcttccgcatgcgtcgacatacagactaaaagtcaagacataacaaagcgccaggtttgggaggcttacaagaaggtgaagagaaataagggctccgccggggtggacggtgtggactttgagaccttcgaggccaatctcgagaacaatttgtataagttgtggaacagactgtcatcaggcagctacatgccacccgctgtcctgcgggttgaaattccgaagtctgacggcggagtcagggttctggggatccctaccatcgcagatcgcgtagctcagatggtggtgaaagactacctcgagcccaagttggaaaagatcttccacaatgattcctacggctatcggccgaaaaagtcagcacaccaggcactcgagactaccaggaaacgatgctggcaatacccatttgttctggacctggacatcaaaggattcttcgacaacatcgaccatgagctcatgataaaagcactggaactccacatggacaccaagtgggaaatgctgtatattaaacggtggctggtcgcccctgtgcagacgaaggaagggcttcagcagcgcgaacgcggtacacctcaagggggagtaattagtcctctgctggccaacttgtttcttcattatgcctttgatgtttggatgcgaaagaattatccaacaattccattcgaacgctacgccgatgatgctgtctgccactgtaggtctcagagggaggcccagcagcttaaagctgatctgtcacagcggatggaagcatgtaaattggagttgcatcccgacaaaacaaaagtggtgtactgcaaagatgataagagaaggggagaatacgagaatgtgtcctttgactttcttggttttacttttcaacctcgggtagcaaagaactctaaaactggcgagtttttcgtcggcttcaacccagccatctccaccaaagctgctaagagaatcaggctcgtgatgcgcagatggaaggtccagctcatgagccatctgtctctggaagagctgagtgataggcttagtagggtgattcgagggtgggtaaattattacagcattttcgctcgacacaagcttcttgatgtgatgcgatatttcgataggagactggaaagatgggccaaacggaagttcaaaagccttaaacgcagacaaggaagagctcacaagtggcttatgcggattgcacggaaagagcccaacctttttccccattggcagatgaaatatgccaagctcacagtcagagatatctga

SEQ ID NO: 759 - DNA, 1881 bp, synthetic construct
  source 1..1881: mol_type = other DNA
atggactacaaagacgatgacgacaagtacccctatgatgtacctgattatgctgccagcaatttcacacagttcgtccttgtagacaacggcggcaccggggatgttacagtggccccgagcaatttcgcaaacggcgtagccgagtggatctcctctaatagcagaagccaggcttataaggttacatgctctgtaaggcagtcttccgcacaaaatagaaagtacacaatcaaggtcgaagtgcccaaggttgctacacagaccgttggtggagaggagttgccagtggctgggtggcgctcctacctgaatatggagttaacaatccccattttcgctaccaattcagactgtgaactcattgtcaaagctatgcaaggtcttcttaaggatggtaacccaattccaagtgcaattgctgctaattcaggcatttattctggcggcagcagcggcggctcaagcggaagtgaaacacctggaacttccgaaagcgctacgcctgaatcttctggtggatcttctggcggatcttccgcatgcgtcgacaacctgtcaacccctgagtccgtgcagaaactccagacggccctgcacacaaaggctaaggaatcacctgattatcggttctactgtctctacgacaaggtttatcgagctgacgttcttgctcatgcctatcattgctgcagagcaaacggcggggccgccggggttgacggtcagacgttcgagtccattgaatctggtggccttgatacttggctcggagaattggctaaagaacttagagataaaaagtacagaccagaggctgtcagaagggtgtacatccccaaaccaaatggctccaaacgaccacttggcatcccaaccatacgggatcgggttgctcagatggccgcagtcctcgtcttggagcccatctttgaagccgacctggagccagaacagtacgcttatcggagagatagatcagcactcgacgccgtcaagaaggtacacagtttgcttaacaccggccataaagaggtaatcgacgctgatctcagcggatactttgactctatccctcacgctgaacttatgaagtctctggcacgccgcatcagcgatcgccacgtgctgcacctgattaagatgtggttggaaggaccggtcgaggaatcagacgagcgaggaaacaagcaccgcaccacacgaaataaagatgaaggtcggggtacaccccaaggcgcacccattagcccgctgttgtctaatctttacatgcggagattcgtgctgggatggaaggctctgggccatagtaagagactccaggctcatatcgtgaactatgccgatgatttcgtgatatgttgcagggggaccgcccagagcgccatgcagactatgaccgacatgatggtgaagctgaggctgacggtgaatgaggccaagacacatgtgtgtagggtgcctgacgaatctttcgactttctgggttatactatcgggaggtgttggagtactcgcacagggcaaccatacattgggacaaggcctagtaaaaaacgcattgccagggtgtgcgagacaatatccgagctcacttccaggaggtggctgctcctcgatgttgatgagcgcgtcagacgactgaatagaactcttattggatgggccaattatttttgcttgggccccgtaagcaaagcttatcgggcagtagatgcccacgcaagataccggctgcggcaatggctgcgcgcaaaacacaaagtgcgaggggccggaaccgctcagtaccccgacgagtacttgtatgcaacacttggcctcgttgagctggcaaggcgaacccgagactttccttgggccaaggtggatatctga

SEQ ID NO: 760 - DNA, 1953 bp, synthetic construct
  source 1..1953: mol_type = other DNA
atggactacaaagacgatgacgacaagtacccctatgatgtacctgattatgctgccagcaatttcacacagttcgtccttgtagacaacggcggcaccggggatgttacagtggccccgagcaatttcgcaaacggcgtagccgagtggatctcctctaatagcagaagccaggcttataaggttacatgctctgtaaggcagtcttccgcacaaaatagaaagtacacaatcaaggtcgaagtgcccaaggttgctacacagaccgttggtggagaggagttgccagtggctgggtggcgctcctacctgaatatggagttaacaatccccattttcgctaccaattcagactgtgaactcattgtcaaagctatgcaaggtcttcttaaggatggtaacccaattccaagtgcaattgctgctaattcaggcatttattctggcggcagcagcggcggctcaagcggaagtgaaacacctggaacttccgaaagcgctacgcctgaatcttctggtggatcttctggcggatcttccgcatgcgtcgactcaaatagactggatcaacctgctaacgttaatgagtctgaccacgaacgaacccgccttagggctagagatgtggtgagggacgaggggatctcttctctccaagcccttcagcgcgtactttatcgaagtgccaaacaggacccgacccggcggttccacgccctttacgataagctgacacgcagcgatgtgatgtggcaggcttggatcaatgtatctacgaaccagggcgcacctggcgcagatggagttagcatagatgccgtgacggccgggggatacgaaggtgtaacatcatttctggatgaactgagcacagaagtgaaggccgaaacctaccggcctcttccccttcgaagggtccacatacctaaggccggaaagtctggagagacaagaccattgggcatcccaagcttgagggacagggtgttgatgtccgccgctaaacttattctggagcccatttttgaggctcagttcagttctactagtttcgggttccgccctaagcggagcgcacatgacgctctcgaggttataaggcagagcgctaacagtggtgcccattgggtgctggacgctgacatcaagtcctgcttcgatgaaatcgatcacgaagccctgatggcattgatcgagcgaagggtgtcagacagagccatgcttaaacttctgcgctcctggttgcgcgccgggatcattgagggcggggtgtattcagacagtgacagtggcaccccacaggggtcccccatctcacccctgctgtgcaacatagctctttccgttctggatgaggcactcgccaaagccaaatcacaaacagggagtgtggtacggtatgctgacgattgggtcgtcctgtgtgcaaccaaaaagcgcgctgagactgcacgatcaattgccgaggctgctctcgccccactcggcctcagattgcacccagaaaagactagaattgtccatctcacaagaggaactgaaggctttgactttctcggctttcaccaccatatggtcgagtcctggaagtggcctgggcgatactacctgcagagatggcccagcgaccgcgccatggccagcattaaggtgaaagtgagagaaatgaccgacagaaggtacgtcggattgtctctcgacgatgttgtcgatcggttgaacccggttctgaggggttgggcaggctatttcaggagaggtaatagcagtcggaaattcaatgttatcgattcttatgtggcagaacggatggctattcttgcttccaacaaatatggtctgtccggacgaaattggggcactcggtttagctatgagtggtttaaatctctgggagtctacgcactgtccggaaaggtgatttcacgaaccgcacatgcacaggatatctga

SEQ ID NO: 761 - RNA, 558 nt, synthetic construct
  source 1..558: mol_type = other RNA
cgactcgttgttgattaatagctttgtgatttccgcgcttttattcactcgagtgctacttggtgggttatagctactcgcgagcagtgagccctgaccgaacgtctctaggaaggggttcagccgtctgtcggatatccggacggtatctgctcgtgccaaaagggccacgctcttggatctcgtgaggtgtctcaactggtcttggttgggaaccgttcacgcacgagagcctttcgaggtgcattcctacgtggagtatctccaaaagctggcctaaagccttcctacctgttcaccttccataggtgcccgctgttaagctcttcggagtgaaccaaggaacaggaggtgggggtgagcgtaaggtgttcgggaccgtgccgaggcgcgtggcaaccgcacctaacaggttgtcgtgaacggcccccctctgctttgtggcgactgcagagtgatattgctggctcggaccttggggcggttggtggcccgagtcttgtgccttggaaccgcttgagttgacgcatcgtgggaaagcttgtatacaaaaccact

SEQ ID NO: 762 - RNA, 254 nt, synthetic construct
  source 1..254: mol_type = other RNA
tgaaacagggccggaataaagacaggcgttcggagacgtagtcttgaaaagatgcaccaggaaagtctccctataacattctacttcgaggagactgtcacgggtacgctgtttttagtgcccggactcaattggtgaagcagtaaccagcaaggtctcccgagatgaagactatagatggagaccgttacgggcacgctgtttttagtgtccgaacaccaattggtgccatccgcgaccctgtctgaggtaac

SEQ ID NO: 763 - RNA, 216 nt, synthetic construct
  source 1..216: mol_type = other RNA
cattttggccctctatcttttgggcctgtcgtttcacggcagagcctacccccaaccaccacaagggggaccacggccggcgggggagaaaaacaaaaggctaggccttccatcggggccaagaagtcaaattctggttcccaacccccgccacacgtctgtacgacgtgcgaggcaaccttccagacggaagccattctgaagagccatctgctc

SEQ ID NO: 764 - RNA, 147 nt, synthetic construct
  source 1..147: mol_type = other RNA
tggctcctcccacccagctgagaccgcccatcgtcacgtctcattcgtgggacgcagcaacagagtgggggaagtttgcgaaggcgccttcgcgccgatatttttaacagcgattcaagctgaaatgtagccgtgtgttatttaacc

SEQ ID NO: 765 - RNA, 170 nt, synthetic construct
  source 1..170: mol_type = other RNA
cgtcatcctctggctctcgttggagggtggcgaagtcggatgcacgcgccttgacgtggcggggagcttacttgactgattctgtggggcttgttctgtggacaagttcctatacggtttcggagattcaaaactaagcgtgcgacggcggacccgaataatgactaaaa

SEQ ID NO: 766 - RNA, 263 nt, synthetic construct
  source 1..263: mol_type = other RNA
tcccagtctcggaaccgcgttcatgacaggttaaacccatggcagttcccgtccttcataaaggaactgtccagtgctaggcccgaaaggccattagctgggaagtccatgacctcgatcaccctgtccgttccggaagcgcgagtgtatgagctagctccagctttggagaaacatcaacctaaatggagcgaaaaccgtacgacctatatgattcgaggttgataacatcaaaacccaagtatgaggggagtacggggtac

SEQ ID NO: 767 - RNA, 291 nt, synthetic construct
  source 1..291: mol_type = other RNA
gggtttttttatttcaaacgtctctagagataaaaataacttagggtcccttggctcagagtctcgacacgcaagtgtcaaagagtcagggtaaatgtcctgctagcgtacgtccgggagactgttcccacgtagagtcggttattggtatatagcacaaggagtatgtcagaaccctgtgtgaggatcatgagttaaatcatatctaattatatctcgagctaaaccgcgaacaggcaccacctcattgctcaagtcctggatgaaggtgtgtatgaaggcaaaacaatc

SEQ ID NO: 768 - RNA, 478 nt, synthetic construct
  source 1..478: mol_type = other RNA
cgaatggcagaggccaggtagcttgaccgggtgtctgctctattatatgtgacggataagggtcgtaatagagcaagaatcatggcaaagattctttgtagagtaagcgtagtgctatccttatctagctggaccctgctagaaacggtccaatctattatatgagtcggatgggggtcgtaatagatttagaatcaggagattctatgtagcgtacgtgtaatgcgatccctgtctagagggtacccggctataaaaggggctggtagcgcaaagtgggaatcgatgattaaattattcccattggatcgttgtctaaaatagacaaactgtatcgacgcgtcactaatcgaatggcggatcagcttatggtccaaggaatgtgatgactcttgaaaattgagtacttgtactcgtattcaacctctctatccgtggtttgcacggagaattgcttaaacggtgtttttgtattaaa

SEQ ID NO: 769 - RNA, 1117 nt, synthetic construct
  source 1..1117: mol_type = other RNA
cgaggtgtccctatccaccatcgggtttcagaaatcttccgaggacaacgtccgagtgctggctgtctggtctgtatgacttgggccaatcggtaaccgatagccgatcctccctgagggcaccacgttgcagccggtaactacagcggtctacctgttgtccatggcaatgggggaatggttgtaggctaactgtcccgggagcggcgatatcctacggtatgtgtcaggatctcgtcgaaggtagagaacatcctaccgaagcctgaatgaagggtaagttttgacttcctgacaggcggccttgacaggattcgcaccgaatcctcgaaaggtaagctgctgcgtccataacgcccgtggagcacagtcatactcggtgcgagctcatagttaacagtaatgatctcgtgtcgtcagccgcagaggggaatcacccgcggtaaccgaggggaactacgatccgtcgccattcctcgaggcccgaatgacctcagcgccacctgctaagggcaaccaaagctggtggcaatgagatgacgggaacaaataataagacctgctgttaacaggcaaggtgctagcctccatccaggctaaccctcaatcctgaagtgaaagggcggcaatcctttcatggaaggaggccctctaccgcgttcaaccgacggctaagggcagctaggcaaaatcactgagaccaaccagtcactatgattgagccggcaggggggcgggatcctgagtaccacgagttatcgggaccgtcctgagggattttccaaagcatcggggaaactctagcaatagttaacactattgatagagtcaaccgtagcacttaatagagacgactcgtggtcgccgggggccttcggtgggtacggacaccgactagccctcgcaggatgtggtcagtccacgtgaagtggaaccaactggccatgtctaagtggaaaggcaaacccttgccggggcgagctaagtacacaaccgatttcatccgggcgccgtacagcccgactcattcgtacatgataagtagggattcgttagtttcggtccatgcgtctggttttgggaacgtttttccggaaaaaacaccaggcgattacga

SEQ ID NO: 770 - RNA, 189 nt, synthetic construct
  source 1..189: mol_type = other RNA
actagataattatttggtaactcttttatactttgttttgttaacaatagtttaaatttttcttttcagtctactaacctacttacaatagtattccttatatctgctgctgttaactgttatactgttgctgacattgaacaatggatcacttttgcttaaggtgaccattggtctttggaattgaat

SEQ ID NO: 771 - RNA, 117 nt, synthetic construct
  source 1..117: mol_type = other RNA
cttctgttaacccgctacgtccggacgaaagtccacgtgagagtcggtaacaaggattcgtagtccttggctaaaagcgggaacggacaaggggctagcgacccccaattctcaaat

SEQ ID NO: 772 - RNA, 159 nt, synthetic construct
  source 1..159: mol_type = other RNA
caccagaaagaggacgtagtggggatgtgtctgcttcagacagatgcattgcccagagtagatgtgacatgtgggaaggctcattatccgtggcgcactcctaccaacgtaatctctgcgtcatcagagagaaaatgatcgaaagatcatcaatccaaa

SEQ ID NO: 773 - RNA, 141 nt, synthetic construct
  source 1..141: mol_type = other RNA
gtcgggatggcagaactacttccttgtagtccgacctgggcactagtcgtagtagactagtggcgaaacgttctgtccctcagcgttgggcgggagcgtatattcccagcgctgttgtattgtgcgcgttaattgcgaatc

SEQ ID NO: 774 - RNA, 257 nt, synthetic construct
  source 1..257: mol_type = other RNA
cgagattgtactgtagccgtgaacggcggtgagtagcatcggagtcggtccccccgcactgggcacccgggaaattggttgctaactttccggaaagttataatgggaatcctcgtggtttatgttatgtttattatgtgattgttggacatgatgatattattgttttgttgttattataattgtgatttgatatatttgtttagtccatcaattgtattaatgtgttatttaccacttgagtgattaaaattctc

SEQ ID NO: 775 - RNA, 830 nt, synthetic construct
  source 1..830: mol_type = other RNA
tactcaggtgatgcgcatttggtaaagggttacaagccagtggccagaatacacctcgtgaagagtctcaggactggattttatttttatcagagttactacccgtcgcagggtctctacgcgaacgttttgtgcatgatggagtcgcgtccctccgtcctcttcatacagcggccgagcgatcactggatggtgataatgttgccttggggtagctgctcggtatatagcctctggattccttagactgtaacatgcgttctcgttcgcgcccgtgtcaggtctacggactgtcagaatgttgtcggtcgagatccggtcgccttaacccaaaggcgtccggggaagagggaagtgcccatccctcggaggaaataatttccaagccaggagaccttcctagagcactagttgagttacgatttacctcaaaagggggacaaatgccggcctccacagagagtccagtgaatgggctcagccgtctacggcagggtagccgaagccttgagcaacccaaagtaagtgtcataccgcacccaacggtatgtcgcaaggcgtgacattaacgtcgtagggccctaggaggatagccctggaaagcacaactcttcgacgaggcccgtctgctattcctccccggtgactaaggaccgtaagccggagaggcctttggaaaatcaccactaggtcggtagctaggtttcctagcgccgaccggagcggcacacccgctcatcgggcccctaaaaaggctcaagtttgcatgggtcaaccccccctgtaaactaatcaactgggttactaacattgaaataaatattaggaac

SEQ ID NO: 776 - RNA, 437 nt, synthetic construct
  source 1..437: mol_type = other RNA
tatgaggaggagccgcgccaccccgtggtggccggtccgagtatggttgggaccgtttctatttgtgacccgatctacggggtccttaaaaatactgagataatgttcgagggaatcgcctttatggtcggtcccggcccgggggggtccagtgcatagcgcgccgtcgcgtctatacatcgcgtacgtttggtttttcgtcggtttttggagaattacctgcgccgtggtcgtcatgcctcgttgcctcgtgtctcgttttgcgttcacgccgctcggtagtgcgtgaatgattgtgggtagtctcgttgatctgaatatgattaaactcatgacgtagaagtcactcaggtgccatgtatagagatgctaggattgtgcgatgtattgaatcataactcggggtacgggtatgattattaaaggaatcgaatact

SEQ ID NO: 777 - RNA, 526 nt, synthetic construct
  source 1..526: mol_type = other RNA
ttctcgagccaagagaaacttctcaccagcgttagttaaggtacgaaatggccctcgggtctaccttgtcgggggtgcttggcctccacatagggcttacttcggtaagtccgtccacgcacggcagggaagccgttagccgtcatcgcaactcaaattagtcgaacggtgcagccaacaccgcaaggcgaggcgcttgtaggagcgtcgaagggtattggaatggatatcctcgaaggtgggatttctacgaggaaatactcaccattctttcccggatactggagccgatagtgtggaaagcacttggataaacaacaactggccgggcagcaaggtttccttgccccggcccggacgacgaactcgtccaccgggtccgtaaaacgacccaacgcttgcctggcctaatcagcccggttgtgcggttaaaacgtagattccgaagtataacgaaaacaaaggtgactcccccaggagtcgctctctgcgtgtcggagagcaaaatgcagccaatgccggcacc

SEQ ID NO: 778 - RNA, 460 nt, synthetic construct
  source 1..460: mol_type = other RNA
aggtgagccgcgctgccgcaaggcagccggtccgagtatgcgtcggcgttggttgcgcaaatacgccctgagctcgagggctttataaatgcttgagctaatgtccccaaaaggggtcacttcattggtgcatgctgaccgcaaggggtcaatgcacggcgctctcggggaaccaaggtcgttggttgatccaaaaaggattatcgatgcgttccgagagacgcgattatgcatattattaacgattctattctcgaggatttgtccgcttctagacggacccatcctcgaccacgaatgaatcgaacggtgtgttccagtcgagtctcttgatccacgttgatttagcccgatggattggccactagcctgtcggttcttgagagagcgcagtgcatggattataattgccgagtcgcatgatccaatgaagtggtaagtgggaatcaggggataacac

SEQ ID NO: 779 - RNA, 475 nt, synthetic construct
  source 1..475: mol_type = other RNA
ggcggagtaaggagccgtgttccgacgttgtgaaggctccacaaattagcccgtggcaaactccgcggtaggcagggctccgtgaagggcggtggaggatctccgtgggaggatttatccaaagatggagaccaccgtctgacacgttgaataggcctaaatctaccccagaccacctcctcgttggtgcaaccggtaactgcactcggtgcaggctgacggtcggggatagtcgtagagggaagcaatcgaaacctctatgttccttcagattcgcccgcggcagtgcccacgcttgggctagttaaactgctgccctgctaaggtagagcaggtgaatactctcccgggacctgtgggttgactcccccttgccccgttcctatgtgtcacagaaacaaatagatcgcaatctgcaaccgaggaaaatcttagccttggaacagatacagaggaccacgcgaccgtaggggtg

SEQ ID NO: 780 - RNA, 179 nt, synthetic construct
  source 1..179: mol_type = other RNA
gaagaaaagaacggaaccgccacgtggaaacagggagaatggacatttcacctaatgacttctgacaggagaacgatgccgatgagatgaccacagcccgaaagtcgcagacgtaaaaggaatcagaagacgataccttccactctctatcctagcgcggatagatgagaaatagtaat

SEQ ID NO: 781 - RNA, 233 nt, synthetic construct
  source 1..233: mol_type = other RNA
gtaaacggcgggagtaacaatgactctcttaaggtatccaaatgcctcgtcaacgtttagtatagggaaaagcgcgggtaaacggcgggagtaactatgactctctcggatagggattggcagaactacctccacgttggtcctatccggggactagtcgtaatagactagtcgctaaacgttctgcccctcgccgttgggcggttgtttccagcggtgttgtatgtgcaaaa

SEQ ID NO: 782 - RNA, 264 nt, synthetic construct
  source 1..264: mol_type = other RNA
gacagaacgtggatgttggcaactgtggttagtccagggtgtggacaaggttatatattgcatttttaccgcttatatgtgaggttcgtggccagaaggcccctatcattgcccctcagagcagatctgataatagggaatcctcgcaggctaactattatattatattgttttgcactgttatgttattactaatttgttgttgttatattgcattgtataattttataagttggattagcctgcttgagtgagtaaattctc

SEQ ID NO: 783 - RNA, 244 nt, synthetic construct
  source 1..244: mol_type = other RNA
ttatatatttgaacggaagctggtctctcctatggaagctagctatgtgctggccggttcaaatagtggcactcactaacagctctatctcagggaaagtagatgagctcctgtgcatctggttccagcgatgaagaccttcagagacagtctaagccgacaacgtcagtgtttcggtattggaagctgtctgtcactgatgaaattctgaccgggaacggcataccagaacctgagtttccag

SEQ ID NO: 784 - RNA, 159 nt, synthetic construct
  source 1..159: mol_type = other RNA
tatgaactaactagacaaatgtctccgataaccatgcactgattcactgttcgctgctcatttcatccgctcccagttctatgcattttctgatcatcatgacacccttgtgttgtccaacatcatgcacttttcagctcttgtgtagaatagttctcc

SEQ ID NO: 785 - RNA, 420 nt, synthetic construct
  source 1..420: mol_type = other RNA
tgcgcgaacgcgtgtttgtcgtcgcagcgcactttacggaatttgggtctcggccgtcggtcgcccggctcggccggcggcggggctctgtgaacgaacggtctcgtggaacgagttggacacgtgtagtgtgttatcaaccagggtttgtttgcctgaaatgtgagacgtaggtggaggcgtctcaggggcgtgggtttgggccgtccgggagaaatccagtccctaccggctagaggggccgttagctgctgaaagtacctctgataccaaaaatgtccggtagcaaggttctcttgttgccgggcattgagacagcggtgtgaaagtctcaggggcgatggtatgggccgtcccgggaggatagccactacgaggtggtcctatcctgcccatcccggctaaaggagccgttagctg

SEQ ID NO: 786 - RNA, 407 nt, synthetic construct
  source 1..407: mol_type = other RNA
cggtgagccacgctgtacggcattacagctggtccgatgataccacggggccgttccatttgtcttgatctcggagacgttaaataaactgagacaattttaagtctaccatgttacctcatgttcccgcccggcgggggtcgcggtgcgtcgcacctgtgtacatattttacggtctgagcgactcggctttgagtcacggccatgggttacgggttaccatactttgccacatacgctagtccttgcacgcccccggtggcgtgtgtggggcagtgggtctctcgcaatccgtgatgatttgagcccgtcgttgctaagctgtactttacggtagcgttaggtcgcgtcgaatcgcgattgtaacgccggtctcgggtacggttttgacaaggtacttaagcaaa

SEQ ID NO: 787 - RNA, 190 nt, synthetic construct
  source 1..190: mol_type = other RNA
gcgccttctaggttgttaaaagtcagggccgtcccggtatcacgctaaatttacccgtggccctggggttatcacccccttacgaaccccatcagctacgaacacaataaatagcataactaaccttagggaaaactcatccccaacggtagtaacagatatatcgtctaatctgtgggtcctctatcct

SEQ ID NO: 788 - RNA, 185 nt, synthetic construct
  source 1..185: mol_type = other RNA
cgcaactcgagctgacaaaggcggcactggtagaaccccagattggatcacacaattaggaccccatcgcaggtgtatggtgggtggggtcccactctccatcccaagacggccacattccgggcaagcccctgtactaatggggtaggtcgggtgtggttgtcaaggggtggatgagaaacaga

SEQ ID NO: 789 - RNA, 430 nt, synthetic construct
  source 1..430: mol_type = other RNA
tccgacaataacaactggtaatggttttgatacaggtaaggaataggtaagtacagtttgagggttgacgtattcttttcgtccttcccaatggactgacctttccggtgtggctggattgtttgttgccagttatcagccatctttgagtccaacgccagtttggcatgtttacttagtaaacatctgaaaagatgacactgggacgacacttggccgggccttttactagtgttcgttagaattaagagactacgtccgcgaaattcacatcagttgattttccacgttgccccgggagggtgaagtagacttgttgttcttgtacggttcttctgaaagtattgtgtgtgggcaaccaaacataatagccgaggaggaacacgataggtagacaagtcgagtaactctgctaacagtctcgctcagt

SEQ ID NO: 790 - RNA, 173 nt, synthetic construct
  source 1..173: mol_type = other RNA
atgggcaaggacaggacatttattgaacactctatcttggtaaaagttttttgttattctttagttttttgtatttgtctttatacctgtaatgtgattggatcatgaacatttcattttggtaattagtaagatgttttatgacggcataacatgatcgctacatccctatt

SEQ ID NO: 791 - RNA, 684 nt, synthetic construct
  source 1..684: mol_type = other RNA
ttgagttgtagttgctggatcttggtctaagtcttaatcgcttggatcttggttcgcgtggctggcctcctcgtggtctcgctggaaacgtcagaaatgacggctaaacagccacttacttgagcccaccgtgttagtttgcagtagcctctgttaggtgatttcctaattgaattaccggcagtgtgcgactgggtatgttgtggtggtgtggctcagcgcgatgcgcaaactctagcgggtgtgatctagctatccggccagatcctaattctaatcacactgacctctggtctttgtgtgtgacagcccttctagcctctaatctgctggaagggaaccgcaggctgaaaacatatcatttatggcgacggctaatgtcactttggatctaaatccttctgctcggcaggcggctccccctagtattcacgggtgaaaccggatgaagaaacggcggtaaaatagctgtttgtcgggtacaaggtgtagtgtgggttggagggaactccggcctgcatacggccgcccgagtggtgaacaagacctcgggccctggtgaaactgtcgtaggagacggtgtcatatggtagtaccagcttcacctgatatggcagtagtagcggtcgtagtctccaaccccattgagccggggggggacctacgagagttctagatacaacc

SEQ ID NO: 792 - RNA, 370 nt, synthetic construct
  source 1..370: mol_type = other RNA
tgtccaactagatcaagcctggcgacgatccctccgcactgattgggatgccggatcaaatgcagtacaaacgctctcctgagcttagttgcaccccccataactctgggtaaggtgtatggtcccccaatcagtgtttgagtgaggatgagccagtgaatattgtccaccggtgtacctgtagtacgtaattgtactactagacggacatttggtgagggaaacagcctcgtgatagattgtcgtgtgatagtgacagggtatcaatgattgcgataatacagccatgcgcgggccgaccagcgtgtttgcctcttcccgtcccgctttgcaggacgtaaacggtgcgaaagtagccgcatcgagaacc

SEQ ID NO: 793 - RNA, 558 nt, synthetic construct; identical to SEQ ID NO: 761
  source 1..558: mol_type = other RNA

SEQ ID NO: 794 - RNA, 254 nt, synthetic construct; identical to SEQ ID NO: 762
  source 1..254: mol_type = other RNA

SEQ ID NO: 795 - RNA, 216 nt, synthetic construct; identical to SEQ ID NO: 763
  source 1..216: mol_type = other RNA

SEQ ID NO: 796 - RNA, 147 nt, synthetic construct; identical to SEQ ID NO: 764
  source 1..147: mol_type = other RNA

SEQ ID NO: 797 - RNA, 170 nt, synthetic construct; identical to SEQ ID NO: 765
  source 1..170: mol_type = other RNA

SEQ ID NO: 798 - RNA, 263 nt, synthetic construct; identical to SEQ ID NO: 766
  source 1..263: mol_type = other RNA

SEQ ID NO: 799 - protein, 1330 aa, synthetic construct
MHHPVPRGGAGAHDDGVTCDRCGKVCKSRGGLKLHRRACLTGGVSGLSSAQAPAGGVVSPDRTSLGKGSSRNGSASGLSSARSSTTDVSRTVSAREGRDEGGNSIVGGLRADALECRVVVERLATTRPPATVSDSVAATIVGGNRADALECREAVDPVPASRPPDSEVASAVLQVESDGLLAAGGPPSDASSPEESRAGVRSRPGVLCGSCGRSFGDKRGLSQHERVAHPADYHSRLAIGHRTGSKRRWTYEEKVLVARAEVSLSGTESLNAKLSLAFPERTFDAIKSLRRNPAYRALVHEIRSEGAGGADGSATASAASDPSGGAGASGVTPECSAQGAPGVPASQEEAIRELADACRADSDALCLSPEELGELIALVDSSVRDPSGPSGQRVQALVDKEYDQWVKSLPIPQPKASQSVPEHSGASSCRGRRRRPRGARPTPGSPGVRTLSKRQQRRRLYGIVQELYRKNRTRCAKTVLSGDWAKEKRTTSLEEQDSYWRPLFEEPSKADSRDPRPVSRALFEISQPVTATEYGLVLKSTHESSPGLDRVDRKVLRGIGPRIGVAHMNLWLLACRPPGAFKVGVTVPLPKSADAADPAEFRPITMATMVCRLFHRLLAHRAERHLPLGARQKAFREGDGLADNVWILRSLIEDCKARHRPLCVTFVDVRKAFDTVSHESVVTAAERIGFPPGLVSYIQCLYTGGVTQLRVGRVLGSPIYPARGVRQGDPLSPLLFCAVMHWVLSQLDARLGLQLAGGVRVNHLAFADDVALMSSCPIAMKRLLCELESGMEMVGLRPNAAKSASLRISVSGKVGKWFCHPEPFLSLAGGPVPAIDIQGSYKYLGIRTGAGRKVGEAVTNKLEEGLEQLSKAPLKPEQRLFFLRVHVLPSLYHETALCKYSKGLLKNLDRKSRAAARRWLHLPHDVPQALFHASPDEGGLGLPELLVQVPLMRRARVEKLFQRATEDRDPVLAAVIGMSRELRRERQRWEGGVPCYSRKVTDRTGRGRATAAALHQSCDGCGLSDTREVPAVSRWVTSGTRVASGKSFVDAVHIRAGCLYSKVRASRGRSGAPGAVDLQCEVCPARRETLAHVVQQCPRSAHARDERHNRVAKLLIQKLTASGFQVEAEPAIKTDYGVRRPDVVAYKPGEKAVIIDVTVVADLPGELSNAHDRKSNKYDDPQIRAWVARRSGVSTTAVSLTSLTFNWRGALHGRSAQDMVSLGVSLGTLEIMSLIVLEWGHRAWRESRDATWIRMDQVPYCPASSRSRDETGPHHHTGGSRRRHLAARPPQPVCPRGTGRHGRPVQAGTPGRGRHQPGPAGARGVVPSSR

SEQ ID NO: 800 - protein, 1201 aa, synthetic construct
MRKCGDRTKCKYCALRLGSFKSIRAHERLTHPVEYTRDINALKPPPDTEVFETLARIEAGSANGYFQKEMSAATGLTIDQVRSRRKKPEYARYLAMAKEALAAARKFKLATPKEPISIPASLPPGDSTRSKSVLPKVDAAPQIQLGPTVPPDQPVEVPVTRECLPPPDPPDSLKSGKRGRSSNSPDGSAPRKRANVDRPSVGQGAVAAAKVVPTPGTSVAPVPCQRTATPSKRKREAPSSDGSSDDDDAVAPRDRAPPRPLLSSPTAGPSWQPSQETAPVPIVYPRTETEPPASPPTPAQPVPRVSPRLERVVSPLTGGAPVASLVGILPQVFADYLRGARQRIPTGHAAVRKIADLALLGSNQELLVAIDQWLDSIISKKGAGKPTGQRGKGLGKRNYGQSRGGRGKRAANYKKAQDLFRKDRKCLAEVVLSGRDMYEPPELPSLRDVEDLYGNILESVSPEDNEVISDPKPQCNTFRPITEEDVRKAMSNWQTSAPGLDRLSIPDVKKVPPIVWSVVLSVIFGRNIHPTSWKELRTTLVPKDGDRKQATNWRPITIGSAAQRLLHRALHARLRDATRLNANQRGFCETDGTLANVLILDHYLGSRVERGSAYNVVSLDLAKAFDTVSHNSILRALKRAGIEGGTQSYVMDSLWGATTTIKVGSEATRPLAIKRGVKQGDPLSPLLFNLVVDEVLDRINAEYRGGTVGSDTNVALMGFADDLVLLSDRQIDVPLMLADINKFFCGRGMATNPKKCVSISAAPFKGDKRPIPVTRSIFSINGQKIPCIDSISSFKYLGHRFGATGVNKPNIPNLQTWLHRVEKAPLKPDQKFSILRDYLLPKLLYGLQNTRVTGAILKDVDRLVRGSVKRIMHMPIHAPDCSIHAKVRDGGLGILELRHAIPQILYGRMTKLLSNAEDPVINTVLQTERLRDIFQRLSKLAGNVPTGQLYREAIINGPQTAGLQAVAEDAASRDWLHQKPQGWTGRDFVRAVHLRTNSLPTRGHPSNPPDQRVCRHKGCTSDETVSHILQRCGAVHDVRIKRHNEIVGKIAAHARKSWQVEEEPHVRHTDGQLFKPDIVIHADHNKTVVCDIQVSWEGNDGLVPAWERKRLVYENQKFLEAATRRWPGKTFHFCPIIIGARGVWPRCNEPAQVGLGLTKQLKSSCVQSALKWGSTLHATFMRRVWANDNAQRRPPIAERAA

SEQ ID NO: 801 - protein, 1067 aa, synthetic construct
MYEEIMLRGPATAGPVIFAEGAAGVEPQMVICELCTRSFQGQRGLHVHQRRAHPPEYHAQHQVLPRVKARWISEESRRMAEQEALLRLSGVQPRDINKRLTEKFPNRSYWAMKGQRKKDSYQKLVSELVLMAPVPESEIPTQTPTGPQVEDPVPMDRSLWKVEVLACIKDLIEKRGSPEEEPLWDSLTSAFVSLSGGTVDLSDVKVCLDLHAKRLTDLLGPKRKRRRPPRKVPRKRTRRFAKTGDEANNSSAADGAAATAAPSKRTRSQRKPNPARIARSQAYGRVQAAFRKNRKRCADMILEGKWEEEATTLRLEEQEAFWRPLFEEPSMPDDRPVLKIPENWQIVDPISIGEVVKALADSEESAPGSDEITLVSLRSVSPSMLAASYNLWLLAGFCPDRFVIGETILIPKDGDLKNPANYRPITVASRVTRVFHKIIAARLTNSVPLDPRQKAFRPVDGCADNVYLLDSLLKDAQRRRRPLNLAFLDVAKAFDSVSHYTLARCLRRQGVPEPLVEYVCGTLANSSTVLKVQGRKSTPIVCGRGVRQGDPLSAILFNLVIDEVIAGLSKSIGFELSENLVVRCLAFADDLVLVATSADGLRDQMFHVIEGLRNGGMLINPDKCASLRIDVDGRAKRWVVNPSPFLVLQDKQIKALDIVGTYKYLGLQAGAKGLRKAYGSFLQEKLDWLSRAPLKPQQRMYILRCHLLPRMYHGLVLGETNSTALDQYDRMVRRTIRKWLRLPHDTVAAYYHAKVVDGGLEIPRLRYSIPVMKNRRMAKLESSLDPVMQWVANSPCFLGAKVRSSKAAKVVGQTLDTGRDVQRLLANQLHTTADGRGLRHQRQSPHVNNWVRDGSDLLSGGDYLEAVLVRGNLFQTPERATRGRRTVPPMCDAGCNSTCTLAHMSQSCMRTHRLRCERHNSVLEFIVNRAIAMRHDVVREPVIPTRAGRRKPDLVALVDGSVLVVDVTIVSDQWNLNTPFTEKVDYYNTDDIKAWLAASYPGKTCEFGAVVFNWRGALNLKSSALLRRLGVSARDETLLSCRVLTFTANMFKAFTRSTVRKECRSSR

SEQ ID NO: 802 - protein, 1330 aa, synthetic construct; identical to SEQ ID NO: 799

SEQ ID NO: 803 - protein, 1201 aa, synthetic construct; identical to SEQ ID NO: 800

SEQ ID NO: 804 - protein, 989 aa, synthetic construct
MAEQEALLRLSGVQPRDINKRLTEKFPNRSYWAMKGQRKKDSYQKLVSELVLMAPVPESEIPTQTPTGPQVEDPVPMDRSLWKVEVLACIKDLIEKRGSPEEEPLWDSLTSAFVSLSGGTVDLSDVKVCLDLHAKRLTDLLGPKRKRRRPPRKVPRKRTRRFAKTGDEANNSSAADGAAATAAPSKRTRSQRKPNPARIARSQAYGRVQAAFRKNRKRCADMILEGKWEEEATTLRLEEQEAFWRPLFEEPSMPDDRPVLKIPENWQIVDPISIGEVVKALADSEESAPGSDEITLVSLRSVSPSMLAASYNLWLLAGFCPDRFVIGETILIPKDGDLKNPANYRPITVASRVTRVFHKIIAARLTNSVPLDPRQKAFRPVDGCADNVYLLDSLLKDAQRRRRPLNLAFLDVAKAFDSVSHYTLARCLRRQGVPEPLVEYVCGTLANSSTVLKVQGRKSTPIVCGRGVRQGDPLSAILFNLVIDEVIAGLSKSIGFELSENLVVRCLAFADDLVLVATSADGLRDQMFHVIEGLRNGGMLINPDKCASLRIDVDGRAKRWVVNPSPFLVLQDKQIKALDIVGTYKYLGLQAGAKGLRKAYGSFLQEKLDWLSRAPLKPQQRMYILRCHLLPRMYHGLVLGETNSTALDQYDRMVRRTIRKWLRLPHDTVAAYYHAKVVDGGLEIPRLRYSIPVMKNRRMAKLESSLDPVMQWVANSPCFLGAKVRSSKAAKVVGQTLDTGRDVQRLLANQLHTTADGRGLRHQRQSPHVNNWVRDGSDLLSGGDYLEAVLVRGNLFQTPERATRGRRTVPPMCDAGCNSTCTLAHMSQSCMRTHRLRCERHNSVLEFIVNRAIAMRHDVVREPVIPTRAGRRKPDLVALVDGSVLVVDVTIVSDQWNLNTPFTEKVDYYNTDDIKAWLAASYPGKTCEFGAVVFNWRGALNLKSSALLRRLGVSARDETLLSCRVLTFTANMFKAFTRSTVRKECRSSR

SEQ ID NO: 805 - protein, 997 aa, synthetic construct
MSFVCPDCSRAFGSQRGLTLHRRRAHEEAFHAENLPKQRVKARWDPEELCMLANLEISLDERPPGDRRGINQILIGHHPGRTLESIKCARKSQRYRDLIQELRNQRSAAPAAANTPDPEERPATEASAEVVDPTWAEDLLELLRGTPCDPISLGLPDLVPGNPSQRVRERIDSEYLEWQPPRPTRSQNPPPHPRRDLPTRPRARRRAMYAGVQSDYKRNRGRTAKRILSGEWDSEAPQTPLEELDSFWREIFTTPSMEDSRSPTSAGPTQWGMVAPVTRDELLAALKGMKDGAPGPDGRKLQDLKGIPLTELQCHFNLWLLAGYQPAALRQGVTVFIPKVEGTRDPAQHRPITMSDMVARCFHRILAKRMETFLPFNIRQKAFRAGDGTAESVWFLQQLIQKHKDQLSPLNVAFVDVKKAFDSVSHQSIILAAKRLGAPPPLLSYLTELYSDAWTSIRAGGERSEAIRSGRGVRQGDPMSPHLFNAVIDWVIQDLDPSIGALIGDGRTNVCAFADDLVLIASTPLGLQTLLDSLDRALGLVGLEISAGVNGNSASLRIAIDVKAKRWVVNPHPFLRVTRLPEDAGLIPATSITQAQKYLGVEISAGAIRAKAANKLQRGLSHLSAAPLKPQQRLYILKHHLLPALYHELVLTPCPDKYMNWLDRSIRAALRSWLKMPKDTPTAYFHAEVVDGGLGVEMLSQTVPLMRSKRLSRLGLSDDPVILAMLEYVAARPGMQRHLQAKTYGDSIINTRETLHAALAGQLHRSVDGRGLTPSAVVPDQHGWIQDPPNTTTGRSFVEAVLLRGSLLHTALRASRGHPDASTACDACGRPESLGHILQVCPRSHAARIERHNKVVQLIVRNAKRKGWNCLVEPTIPTRAGVRRPDIVLYKDTGPACVIDAQVVADNADLSVAHHRKCDYYHQPEITDWIHHQTGAGQVIYSSATLSWRGLLSGESAHCLHKTVGLSRNTLALISQATLEMGHRVYRQFKRSTLRTR

SEQ ID NO: 806 - protein, 1204 aa, synthetic construct
MNQNKAAGEIPGHPSGDSNRCPLEQMQWQANRVAGETTLRILHAGGSSGERKDWKCPICERIESSNKLLLRHLSCVHREGGPYTYCCNLCHHYESTNIFSVSAHKRYCKLQSARGMGGSAVAASAGPSAAADAAEQQVEKPFPCNDCSGSFGTQMGLSQHRRIKHPKEYDHERTLRSVGGSVKWTDTELRAMAAEEIRLKAQGERSINQKLCCSSGRTVEAVRLRRQKKDYRNLVTELVGGKVEALVEEQVDNDTHVVDHGVGVREPPPEVPDFREDLLRRIQTDLAKLESTTGLDLALSEFAKACGLYERVRATAAEMDEAWVNWLMATAGCLGVSMTPPTEERDGNGRKRRQNLRRRQKRQDKEKKTRAKEKAKVYAATQNAVRRDPGETYRKIMDGTFSAIVDRSMPSIESVESTYSERFGVPRLDSEEVTPLRDVTEDSCLLGPITCEETRRALASSKPRTGTGPCKWLTLEIAKAIGPQRLAIVYSIWWLFGRIPDTERSCRTVLIYKDKGSREDVDNYRPLTIGNMLVRVYARIWSGRLTEVTSIHRRQKAFVKADGCFENITLLTEAIKHSKRKARPCHIVFLDLAKAFDTVPHPSLIRALTRQGVHPAVRELVADMYTRATTSINMGEKGKCRIDLRSGVKQGCPLSPLLFNLMLDELVTGIDDRDVGIELGCGTKVSIMAFADDLVLLADNATDMESMLNQSAEFFSRRSMKVNVGKCQSLRLERHRVRKGLCLVEEVHRYWKGMAIPSMGLGGVSKYLGVKVTPEGAVNVSQDEVDLWGTRIDKASLKPQQKVDALKCHLVPRLMHQVRLAELGRVKLQQMDRLLRRYFKKYLHMPRWTHTSWIHHRKGGGLPSLVEAAPRARLKASWRVLEGTDEILKPIVRGVAERARSDLLASNLVDEIDLESAAQLKKACEETRRRELSKTVNGGALTTMLNSSASRSWSSGKIYDGRTTVVTGKILSGTLPTRLNQHRGSREVERARLIACRRCGKTAETDIHVLSECEGSHGMICRRHDSVAHKLGKDLRAVGYEVQLERSVKIDQRVLRPDIIAIKAVPMVSPPEGPARTKAFLIDVTVPYERSLELLGERELAKEDKYGVLSASHVGAAIGRTIDEVEAVGIAVGCAGTVAPGTKTKLRNLGLPSTTARSLSITALAKSGQTWMAFERGKTTGSGSAIANSGSLYGSLTAPPSNSP

SEQ ID NO: 807 - protein, 1159 aa, synthetic construct
MLPRSTGASAPPRTLTDRGGPSGGNPTLSLVYPLTDLTCPLCGCVPKGQKVLVSHLGSAHQVTNLTWECGRCHKGWESNRAVAAHYSRCRGRPDAEPARLDTGTTEPDEQVGVDGPSGGGGGEPPPVADASAGGRPHLEVSPGPTRPARHSGPGSPREPDSRGVLCDECGRSFGTLAGKQLHRKRKHVAEYNASLPEQSTRNVFPEEVLRDLAAAALDYPGRGVTGLGVGQFIAERFPRYRVADINALRKRPKYRQIENQLRADRLAAACMPGGEAGGVDNRDARPARAPTVLVRPMGPAESALEDQAWDFYQAVVDGGDIDTLYRGLFDLANGQRPSRGRSQNRHDNGERPPAATNRTQRKRERYRLHQRLFAKRPSDLMNELRKPGTAGQEVLPDTAQVQQVYSERFGSASPRDEAPYRVKPGAAEGPLSPFTIDEVRGVLRSMQLSSAAGPDGVTVKDLVTWGVRVIHPIVNAFLHRGKIPADLRSNRTSLIPKKPDPRDVNDFRPITIGPILNRFYAKLLAERLRSTVTLDPRQKAFVPVDGCSEHLFVVGEVLDLCRKRRKECNMVFLDLAKAFDMVSHHSLLRALARHGVGARFVDIVRDLYTGVSTTIRGRQGPTTPIQMARGVKQGCPMSPILFNLMMDELLESVGDRHELRPARNLPGINALAFADDLVLASGTAHGTEWLLEKARLFFGARSMAVNAEKSHVIRMTLPPRSEAVKVAEGSTFKFGEKPLQNRKVTEVVKYLGLQLSPLGTPKFKETQFLIDLGVVRGSALKPAQKMTLLRRNVLPSYMHSLRLSKVSDQLVRRLDGELRRAAKRILHLPPGTPSDFFYLSPKDGGLGLPNIREAVGLSRLKRITSLRASEDAVVRSYAETSHPLEHECRFWVRALGITDTSFRGLRHAKAALPGQRAARYRETPLGAMFAADKSRAGHPWIKEPRLLSGGDYVLAAHMLSETLPTRVCLARGQTIATKTCRRCRETDETMAHVLNGCSGTRRAQISRHNWVCDTLRQALMKSGSETETVSVLPELRVRVGGEEYRPDLTVIRGPIATVVDVAVAYDSRAENICRRYHDKLRKYDIIRGPLSDQLNERPGATPITEVRVEALVVGSRGLLMPETCQRPLSRLGLSKSLAYTLQEGTVRGSAGVWRCFRAR

SEQ ID NO: 808 - protein, 1339 aa, synthetic construct
MISSTDSHRSVPPQPTEERLRTARGATSGSRTLCSQSGSPAGNYAGSDENFIRDTSASARGTSSLRNQMPVCLLCGIQCKNVAGLKRHAARHARHPNITPLNHLYGAFGFSCQECGADFSSQRGLSQHCRRKHPNSYNQTRLASMPTSKYYWSRDEDHRLLAAASSICQSSANLSELHSRLREHFPSRSKEAIKKRLQKLHWRQQTILDNATPGAVGSPDDLGSGGRSPISPSPLIQETAHSPLINADTEVLDHPDNQHAVSSIPIQQGGSRSMEHLGSGIRSPGSLPVLSSRSQNTPNADHDSFCPRLSDPPGVVSLSIHNQGITQPTPSNRLSALSGVVSPAPICISESPPQYQTTEPTMSTPSSSMTLHAGVATIASDDQSGAATMLQTDISLPAQGDTNEQSGGYINMESPVFPTAMAELLQTPSHLSPSDPVCFQNIPLSFLPLAQPPSIWDDSGAHFSMETPPISCPEVAISPLSPSLNLLLSAREQLTLAPENDKFRELLPEVSKTILESDDLRSLQNSLEDFAQHHFPATWKRRIHRTQSRSSIMNNKTFRRLQYSHVQRLYRNRRSDAAKTILDGRWRNAFLENNDIFPNFTSYWKETLSGDSPTDDRPPRMVLPEITRLIDPITPEEVSSAITGLMGSASGMDHITPIQLRQMPSTSLAAFFNLMLASGYIPRSLNTARLTFVPKTSNPLSPSDFRPISVTSTLTRCFHKILFNRWSPNFPSDRGQFGFLQQDGCFEITSILHAILRNTHAHSKDICIAFADISKAFDRVSHSSILRNASSFGAPTLLIHYLTHFYTSGTTYLDGEPISCRRGVRQGDPLSPLLFIMALDEALQNSTDFLFHTPAGPLPHLAYADDCILLSHSPESLTRRLYQFNKELHSLGLSLNILKTSTLHICANGRAKSVALDTSPIFINSEPLPVISPDSTINILGIPFSWSGKSPTDVSLRCSDMLNELRQAPLKPQQRIDILQHFLMPRLIHCLSLGAVHKNTLRKLDVKIRQNIKAWLRLPKDTATAFFYASVEDNGLGIPNLSTRVPLNRRRRLERHLSSPNPTLAWALRDPTSAPSHYLATSTISVAGNPISDLKFATTAWANALYSSVDSAPLRHVSTTPTSHDWLRNPQRIFPRLYIRAIQLRAGVLSTKSRRARGHRIPAEDIKCRACATPETLSHILQTCPLTHDARCRRHNEIVHMTIRKSSKRHITTMLEPHIPTARSFLKPDLLVVSNTNVFVADVAVCDPPRMERTYQEKSAKYGAISNQTLHAVNRFHPGVRTIIQCPLIFSNRGHIHPTSQKHLLRLGFTRLDISDLCVATIQGSLKTFDTYMRGSGTA

SEQ ID NO: 809 - protein, 1066 aa, synthetic construct
MCRARPSCHLTECSEALPGEAKARLGPAGLTTLSGFCYHVATTNTQNEEAAPVAPESNNRSEGGASDDVSLARCPDCLRQFATKRGLSIHRRSAHPEEYHLENVPKERKKARWDHEEMVLLARREIDLQAAGGRPNVNQVLADVFPSRTLEAIKGVRKRPAYKELLRNLTSSIGTQDGASSLPSEGPSLGSETQQASSEEWTHDWVSDLKKAVVESGIKLDGFRLDDIEPGVPSDWVRDAVDSNYEAWLPSPTEAGRNQRARAPEKEPEGARTKRRAQYAQVQRCYDRDRTRCAQQIIAGNWREPPASLPMSVQEPFWRDLFETPSVPNSQSLPIVGEMHWELTHPITAEDVVRALKKMKDGVPLPDGRKLQDVKAIAADELAGHFNLWLLTGCLPERLRRGQTVLLPKCAEAGDPAKYRPITMSDIVVRCFHRILAQRMEIHLPFSTRQEAFRSGDGVANSVWFIQAVIKHHQDSLRPLNVAFVDVKKAFDSVSHQSILVAAARLGVPPPFLGYIRELYSNAVTTLRIGPDVSGPIRLGKGVRQGDPLSVHLFNAVIDMCLAGLDHSLGIEVSDLRVNHGAFADDIALFAATPRGLQALASELEFQLSMCGLSISSGPHGKSVSMRLDIDGKAKKWVINPLPFLRIANETVPSVSLSQVYRYLGVDVSPRRTKANVAQMLRDGLASISSAPLKPQQRLYIATYHLLPKCHHQLALSPSLAKYLRWLDRTVCSALRSWLKLPKDTPVPFFHAPVVEGGLGVPLHEHVVPLMRAKRLSRLDETPDPVIAAMLKVVSARAGSATMTRQTTLNGRVMTSSCDLKTTLATMLHHTVDGRGLVHSSRVPECHQWVNPVMSSGNQNTAGPYIAAIRVRGNLIGTALRTSRGRPQALSACDCCGRTGSLAHILQVCPRTHASRIARHDKIVDLVESALTRKGYTTCREPAIPTPAEIRKPDLVVARGSAVTVLDATVVADNADLAQSHSRKCEYYDAPAVREWIRDRYGSGEVTFSAVALNWRGSMAIPSACGSLGVSGAFLGLISFVTLERRSWIANHFRRSAYRVRHNDGV

SEQ ID NO: 810 - protein, 1217 aa, synthetic construct
MASSLERTSSSGSVPIQRNEENIQVLLPDATAPAWEEVLTGVKQGTIPTVLIELGLIFINGARVLPRDIPAWLGHEATDIPSEAENEDKTVEEAKSWTEIVLEDDGTVAITVPFNTSVCCKEVFISHPALDKHMSVAHNDTFRRYKCALCTKTFARYKQAAVHHGFCKKKNSREKVVARAEDAQKGTIDNPIEILNPFEDLATEETEEADLVQEQTKVAKKTGLSQHERYRHPNLRNAKRVAGKQNDIERKRLAREKTREQAEETEGTLKPKRTRWSEAETKMLIQLEVELQGSKQINIAIAGILESKTAKQISYKRSMLSKAKQPKGQTPPLDAEPVPIPEPLSVPLVEMLKEAICVDGGENVDMSAELLTRAIEGESVDELQDKLLDIIKTACSKPTKKQNGPVDIPHNPRSDREKKREEYRRIQRLYYKKRKELATEILDCKPAAAKCDLDPKTVHATYQARFGGESQEVNLSRYPKAKPADNELLMKPITQDEIQKAYSRAKKDSAAGPDGIGLRKLKELDPKFAMTCNIYNVWLHTRKVPNQIKDNRSILLPKGTKDLEDVNNWRPLTISSVMLRLYTNILAKRVTKGVPLNPRQRGFIEAPGCSENGFLLQRIQKHAKRNRKRLSVVFLDLAKAFDTVSHKHISEGLKRFRVNSHFIDAVVDLYTDASTHFTLAKGETPKIPMTRGVKQGDPLSPLLFNVAMDPLLEAISAQNNGYKWDESGLQLEALCYADDNGLLTEDPKEMQSNLDVVNEFCEATGMRLNVKKSAGYDIQPSANRSYIINDFQPKWEVDGQKLPLIAPADGTKYLGVKVNSWTGVTAENTGEKLELWCSRIDKAPLKPRQKLVMLNQYAIGRIQFYMSQVETPQCKLLEMDLTVRRYAKKWLKLPDCATNHILYAETKKGGLSLPRLSLSVPCSRINVKRAILNSSDESIRSFAIATDLPEEISREAEHFKIKIPQSAKRGAKWRQLKTNRWRTLPVAGKGQRAFSFKWSNSWLKTNHNYFEEGDFITGLKLRTDTYPTRVTLARAGNTGETTCRRCKSAPETIGHISGQCPAMKGYRIARHDGICEIVSDRLKSKGWTVAREPKLVDDDGNTLVPDIVAIRENRAVIIDPTIVYENSPNSLPQANKVKIQKYLPLNEVIKDEFGVDEVEVHGLAIGARGGWCTQNTKCLTSCDLHDIGLYALLCRYALRGTINMLRMFTDLRGQRRT

SEQ ID NO: 811 - protein, 1086 aa, synthetic construct
MLHIRVRTFPRYKQAAVHHGFCKKKNSREKVVARAEDAQKGTIDNPIEILNPFEDLATEETEEADLVQEQTKVATPTFQCEECDKTFSKKTGLSQHERYRHPNLRNAKRVAGKQNDIERKRLAREKTREQAEETEGTLKPKRTRWSEAETKMLIQLEVELQGSKQINIAIAGILESKTAKQISYKRSMLSKAKQPKGQTPPLDAEPVPIPEPLSVPLVEMLKEAICVDGGENVDMSAELLTRAIEGESVDELQDKLLDIIKTACSKPTKKQNGPVDIPHNPRSDREKKREEYRRIQRLYYKKRKELATEILDCKPAAAKCDLDPKTVHATYQARFGGESQEVNLSRYPKAKPADNELLMKPITQDEIQKAYSRAKKDSAAGPDGIGLRKLKELDPKFAMTCNIYNVWLHTRKVPNQIKDNRSILLPKGTKDLEDVNNWRPLTISSVMLRLYTNTLAKRVTKGVPLNPRQRGFIEAPGCSENGFLLQRIQKHAKRNRKRLSVVFLDLAKAFDTVSHKHISEGLKRFRVNSHFIDAVVDLYTDASTHFTLAKGETPKIPMTRGVKQGDPLSPLLFNVAMDPLLEAISAQNNGYKWDESGLQLEALCYADDNGLLTEDPKEMQSNLDVVNEFCEATGMRLNVKKSAGYDIQPSANRSYIINDFQPKWEVDGQKLPLIAPADGTKYLGVKVNSWTGVTAENTGEKLELWCSRIDKAPLKPRQKLVMLNQYAIGRIQFYMSQVETPQCKLLEMDLTVRRYAKKWLKLPDCATDHILYAETKKGGLSLPRLSLSVPCSRINVKRAILNSSDESIRSFAIATDLPEEISREAEHFKIKIPQSAKRGAKWRQLKTNRWRTLPVAGKGHRAFSFKWSNSWLKTNHNYFEEGDFITGLKLRTDTYPTRVTLARAGNTGETTCRRCKSAPETIGHISGQCPAMKGYRIARHDGICEIVSDRLKSKGWTVAREPKLVDDDGNTLVPDIVAIRENRAVIIDPTIVYENSPNSLPQANKVKIQKYLPINEVIKDEFGVDEVEVHGLAIGARGGWCTQNTKCLTSCDLHDIGLYALLCRYALRGTINMLRMFTDLRGQRRT

SEQ ID NO: 812 - protein, 1252 aa, synthetic construct
MNRVTSQVAISIANMASFPLGTSFPLGTSSTGLVPIRCNEGNNKVLLPAANTPAQEDVCEGEQIRIRPTILIEKGGLMFINGARTLAENIPIWLGHDATDCEMDDTRTWTELVIESDSTVAITVPYTTSTCCKEVFISHSELDKHLSVAHSDAFRRYVCALCMRSRARYRQIAVHYAFCLRSNRKEAVASTPSTLDGPEASLCDTNPYISLAAESSPEDTEEGDLSQRAIPVTKPTFECKECDRSFPTKIGLSQHERYKHPNLRNANRIADQEKDIERKRKARSDSKKLTEETGTTSKPKKSLWTEVEIELLVQLEVELSGARFINMAIAERMPGKTNKQISDKRKSLKSQVTSKARTKKVQNPTPTLVQDTTVVQSEPTIPREDMFNNAICNSGLECVGMSAELLTQAIEGKDIDGLQDKLITIIKSACSKPIKAKPNGPANSTENPSGKKKNKQEEYRRVQNLYSRRRKQLATEILDCKVGSTKCDIDPQIVQETYEGRFGGESQEVNLSKYPNAKPADNNVLIEPITQQEIQKAYSRAKKDSASGPDGIGLKKLKELDPQFAMTSNLYNVWLYTGKVPMEIKENRSILLPKGTTGLENVDNWRPLTISSVMLRLYTNILAKRVIKGVPLNPRQRGFIEAPGCSENGFLLQRIQKHAKRNRKRLSVVFLDLAKAFDTVSHKHIQQGLKRFCVNDHFIETVVDLYTDASTHFTLAKGETSKIPMTRGVKQGDPLSPLLFNIAMDPLLEAISAQNNGYKWDESGLQLEALCYADDNGLLTEDPKDMQENLEVVNEFCRATGMKLNVKKSAGYDIKPSANRSYVINDFHPKWVVDGQKLPLIAPADSTKYLGVKVNSWNGVTKEDLGEKLELWCSRINKASLKPRQKLVMLNQYAIGRLQFYLSQVETSQGKLLEMDLTVRRYAKQWLKLPECATDHILYAGTDKGGLSLPRLSLSVPCSRINVKRAVLNSSDESIRAFAVETGLPEEIDTDADHFRIKVPANPKRGAKWRQLEANRWRKLKVAGKGHRAFGHKCSNSWMRNENNYFNEGDFITGLKLRTDTYPTKVTLARAGNTGGDVACRRCKAAPETVGHISGQCPAVKGYRINRHNGICGILSDRLKEKGWTVALEPRIKAADGKTLIPDIIAVKDRQAVVIDPTIIYENSDHSLQSANKAKIQKYSPLTNEIKTLYGADKVEFHGLAIGARGGWCSQNTKCLTSVGLHDTGFHAMLCRYALRGTINLLRTFTDLHGPK

SEQ ID NO: 813 - protein, 1252 aa, synthetic construct
MNRVTSQVAISIANMASFPLGTSFPLGTSSTGLVPIRCNEGNNKVLLPAANTPAQEDVCEGEQIRIRPTILIEKGGLMFINGARTLAENIPIWLGHDATDCEMDDTRTWTELVIESDSTVAITVPYTTSTCCKEVFISHSELDKHLSVAHSDAFRRYVCALCMRSRARYRQIAVHYAFCLRSNRKEAVASTPSTLDGPEASLCDTNPYISLAAESSPEDTEEGDLSQRAIPVTKPTFECKECDRSFPTKIGLSQHERYKHPNLRNANRIADQEKDIERKRKARSDSKKLTEETGTTSKPKKSLWTEVEIELLVQLEVELSGARFINMAIAERMPGKTNKQISDKRKSLKSQVTSKARTKKVQNPTPTLVQDTTVVQSEPTIPREDMFNNAICNSGLECVGMSAELLTQAIEGKDIDGLQDKLITIIKSACSKPIKAKPNGPANSTENPSGKKKNKQEEYRRVQNLYSRRRKQLATEILDCKVGSTKCDIDPQIVQETYEGRFGGESQEVNLSKYPNAKPADNNVLIEPITQQEIQKAYSRAKKDSASGPDGIGLKKLKELDPQFAMTSNLYNVWLYTGKVPMEIKENRSILLPKGTTGLENVDNWRPLTISSVMLRLYTNILAKRVIKGVPLNPRQRGFIEAPGCSENGFLLQRIQKHAKRNRKRLSVVFLDLAKAFDTVSHKHIQQGLKRFCVNDHFIEAVVDLYTDASTHFTLAKGETSKIPMTRGVKQGDPLSPLLFNIAMDPLLEAISAQNNGYKWDESGLQLEALCYADDNGLLTEDPKDMQENLEVVNEFCRATGMKLNVKKSAGYDIKPSANRSYVINDFHPKWVVDGQKLPLIAPADSTKYLGVKVNSWNGVTKEDLGEKLELWCSRINKASLKPRQKLVMLNQYAIGRLQFYLSQVETSQGKLLEMDLTVRRYAKQWLKLPECATDHILYAGTDKGGLSLPRLSLSVPCSRINVKRAVLNSSDESIRAFAVETGLPEEIDTDADHFRIKVPANPKRGAKWRQLEANRWRKLKVAGKGHRAFGHKCSNSWMRNENNYFNEGDFITGLKLRTDTYPTKVTLARAGNTGGDVACRRCKAAPETVGHISGQCPAVKGYRINRHNGICGILSDRLKEKGWTVALEPRIKAADGKTLIPDIIAVKDRQAVVIDPTIIYENSDHSLQSANKAKIQKYSPLTNEIKTLYGADKVEFHGLAIGARGGWCSQNTKCLTSVGLHDTGFHAMLCRYALRGTINLLRTFTDLHGPK

SEQ ID NO: 814 - protein, 1252 aa, synthetic construct
MNRVTSQVAISIANMASLPLGTSFPLGTSSTGLVPIRCNEGNNKVLLPAANTPAQEDVCEGEQIRIRPTILIEKRGLMFINGARTLAENIPIWLGHDATDCEMDDTRTWTELVIESDSTVAITVPYTTSTCCKEVFISHSELDKHLSVAHSDAFRRYVCALCMRSRARYRQIAVHYAFCLRSNRKEAVASTPSTLDGPEASLCDTNPYISLSAESSPEDTEEGDLSQRAIPVTKPTFECKECDRSFPTKIGLSQHERYKHPNLRNANRIADQEKDIERKRKARSDSKKLTEETGTTSKPKKSLWTEVEIELLVQLEVELSGARFINMAIAERMPGKTNKQISDKRKSLKSQVTSKARTKKVQNPTPTLVQDTTVVQSEPTIPREDMFNNAICNSGLECVGMSAELLTQAIEGKDIDGLQDKLITIIKSACSKPIKAKPNGPANSTENPSGKKKNKQEEYRRVQNLYSRRRKQLATEILDCKVGSTKCDIDPQIVQETYEGRFGGESQEVNLSKYPNAKPADNNVLIEPITQQEIQKAYSRAKKDSASGPDGIGLKKLKELDPQFAMTSNLYNVWLYTGKVPMEIKENRSILLPKGTTGLENVDNWRPLTISSVMLRLYTNILAKRVIKGVPLNPRQRGFIEAPGCSENGFLLQRIQKHAKRNRKRLSVVFLDLAKAFDTVSHKHIQQGLKRFCVNDHFIETVVDLYTDASTHFTLAKGETSKIPMTRGVKQRDPLSPLLFNIAMDPLLEAISAQNNGYKWDESGLQLEALCYADDNGLLTEDPKDMQENLEVVNEFCRATGMKLNVKKSAGYDIKPSANRSYVINDFHPKWVVDGQKLPLIAPADSTKYLGVKVNSWNGVTKEDLGEKLELWCSRINKASLKPRQKLVMLNQYAIGRLQFYLSQVETSQGKLLEMDLTVRRYAKQWLKLPECATDHILYAGTDKGGLSLPRLSLSVPCSRINVKRAVLNSSDESIRAFAVETGLPEEIDTDADHFRIKVPANPKRGAKWRQLEANRWRKLKVAGKGHRAFGHKCSNSWMRNENNYFNEGDFITGLKLRTDTYPTKVTLARAGNTGGDVACRRCKAAPETVGHISGQCPAVKGYRINRHNGICGILSDRLKEKGWTVALEPRIKAADGKTLIPDIIAVKDRQAVVIDPTIIYENSDHSLQSANKAKIQKYSPLTNEIKTLYGADKVEFHGLAIGARGGWCSQNTKCLTSVGLHDTGFHAMLCRYALRGTINLLRTFTDLHGPK

SEQ ID NO: 815 - protein, 998 aa, synthetic construct
MAHLAIGIWTNCGPTVRSKQPRKNRRDRVPDGPDQDGPLPGEGELENDQARTVEEIRNPNLTPDHDTEGADENVNIGEGSSNDNTRSATCPICGKSFSGFPGRRLHERKAHATEFHAQESEILHKKINKRWTDTEMYLLAQRDASLQHAGMSNIDRIVELSNEFERSIDTLRKRRTLPEYKVLLDAALEKLTERVELHITPPVQIEPPMEGSNVNKPVQKRVATLWTIEEEMMLANKEAILTIDGKIGSEITEILSNGSSRSKESIRKRRSTQGFKQLVKAKIQELTQPIHLEVITEGPELRQELTQVIHLEVIHEEPELEVQDTPTPPPRLEEEDEAELNRQDMFKHWFTVAGESQMRNLWDPTQRMGINEAHEEIDKYTEEFMQAERLIKAERPTNVDRRKSTPPQGGRKSRRNNLMQLTQKKFEKDPSGCIRAILNDTLVNEGGVDQVLLREYWTEVFNKTPACEVFESKMKHPVLYKLSEPITKNEVEIGLKSLKTKSAAGVDGITCADLKKAKVGKIVTLFRVFQVSSYTPARLCLGSVSMVPKIPEPTLPQHYRPITVASMILRLYHGIIARRFDMLPISPRQKAYKKLDGIEENIWIVSKLLELAKKNKKGIALIFLDISKAFDSVGHPIIQQAAERLGVPKDIRNYLDVLYSTSELVFKGCSQKFKQNKGVRQGDQLSGPLFNGTADLGNEDLDLNVQFMIDEDVGIAEGLFADDEFLAAEGSLALQYQVDRVIPRYKKCGLQMNTSKCKTIFIEYNAQTKKYMVNPNPIIKINGEEVPAVSLEEAYKYLGVKLGAGTPKHKDILETLKIKLTRIDKSCLRPQQRLMALRRHIVPSLYHVMIFSKATKASLLTLDRSIRHFVKKWCHTPKDTLNSMIHSDIKDGGLGIPSLSLRIPRMAMQRHIRLSASIDPVIQAILKSEAGQASVARIHKTRRVNGIDVETKQAEREVWMEEMYSRVDGKGMKQHRDSETINEWVSDCSYKISGADFI

SEQ ID NO: 816 - protein, 1172 aa, synthetic construct
MPEVPENDIARTEGEIRNPNHASDYDVEGANVNGNIGEGNSIDNTRSVTCPVCGRSFASYSGRRVHEKHAHPTDYANEELVLHKNKSKRLWTENELYLLAQRDAALENMGMMNGDRIVILVNEFERSADSLKKRRNLPEYKALVKAALEKLRNLPVQEEVRVESHTTPIVPTVLNVSTDTVNTVVHNPVQKRVALLWTIEEETLLAHKEAALIMEGVEGTEITKILSEGSTRSHESIRKRRCLAAYKALVQAKLRELTQEPPSELEIDSEISSESQGVIIEETQETHLVESQETQTPRVELSDDDQAELNRQEMFKHWFTVAGQTQLKNLWDPTKRMGISEEPIEIDKFTEEFIQSNGLLKTEKPKDVERKKSAPPQGGRNARRSALRSLTQRKFEKDPSGCIRAILNNTLVTEGGVDIKVLKEYWIDVFNKKPDCEIFESKMKHPTLYRLSEPITSKEVEEGLKALKTKSAAGVDGVTCADLRKVKVSMIVLLFRIYQACSYTPAFIRLGSVTMVPKIPEPTLPQHYRPITVASMILRLFHGIIARRFDMLPISPRQKAYKKLDGIAENIWIVSELIELAKKNKKGIALIFLDVSKAFDSVGHPIIQQAAERLGVPKDIRKYLDVLYSSSELVFKGCSQRFKQNGGVRQGDQLSGPLFNGTADLGNEDLDPNLMYMICEEVGIAEGLFADDEFLAAERSMALQYQVDRLIPRYKKCGLQMNADKCKSLVIVYNAQRKKYLVDPTPVITINGALVPSISLDETYKYLGVKLGAGTPCHKNILESLRVKIERVDKSCLKPQQRMLALRRHIIPSLYHVLIFSKASKKSLLTLDRNIRSFVKKWCHLPKDTLNSFIHAEIRDGGLGIPNLSLRIPRMTMQRHMRLSASLDPVVQAIYTSIAGQASIARIHKPRRMNNMDIDTKKTEQEVWADELYSRVDGKGLRQHRDSKMINEWVTDCSLKISGADFVRAIQVRSNTLKTPARAARGRTENGNNLCRLDRQVANSNHIFQVCQATHGLRVKRHDEVVDMLKSSMIKRDYVTFKEPKLQYKKTFRKPDLIISKSGKVTILDPIICGDTADLNERRLQKEVLYGEEVLLEEARRIVRAHDPGIQIKETIVLGVPISFRGSLDNFTIRFLKRLGVPRRFLNLIIVRTLVNTYKMFQAYQRMTTAAR

SEQ ID NO: 817 - protein, 1203 aa, synthetic construct
MAHLAIGIWTNCGPTVRSKQPRKNRRDRVPDGPDQDGPLPGEGELENDQARTVEEIRNPNLTPDHDTEGADENVNIGEGSSNDNTRSATCPICGKSFSGFPGRRLHERKAHATEFHAQESEILHKKINKRWTDTEMYLLAQRDASLQHAGMSNIDRIVELSNEFERSIDTLRKRRTLPEYKVLLDAALEKLTERVELHITPPVQIEPPMEGSNVNKPVQKRVATLWTIEEEMMLANKEAILTIDGKIGSEITEILSNGSSRSKESIRKRRSTQGFKQLVKAKIQELTQPIHLEVITEGPELRQELTQVIHLEVIHEEPELEVQDTPTPPPRLEEEDEAELNRQDMFKHWFTVAGESQMRNLWDPTQRMGINEAHEEIDKYTEEFMQAERLIKAERPTNVDRRKSTPPQGGRNSRRNNLMQLTQKKFEKDPSGCIRAILNDTLVNEGGVDQVLLREYWTEVFNKTPACEVFESKMKHPVLYKLSEPITKNEVEIGLKSLKTKSAAGVDGITCADLKKAKVGKIVTLFRVFQATSYTPARLRLGSVSMVPKVPEPTLPQHYRPITVASMLLRLYHGIIARRFEMLPISPRQKAYKKLDGIAENIWIVSELLELAKKNKKGIALIFLDVSKAFDSVGHPIIQQAAERLGVPKDIRKYLDVLYSTSELVFKGCSQKFKQNGGIRQGCQMSGPLFNGTADLGNEDLDPEVQFMIDEDVGIGEGLFADDEFLAAEGKLALQHQVDRVIPRYKKCGLGMNTSKCKTILIEYNAQTKRYMVNPKPFIKINGEEVPAVSFEETYKYLGVKLGAGTPRHKDILETLKLKLSRIDKSCLRPQQRLMALRRHIVPSLYHVLIFSKATKGSLLTLDRSVRHFVRKWCHIPKDTLNSMIHSDIKDGGLGIPALSLRIPRMAMQRHMRLSASIDPVIQAILKSEAGRASVARIHKTRKVNGIEVDTKQAEREVWTEEMYSRLDGKGMKQHRDSNTINDWVSDCSLKISGADFVRAIQIRLNTLKTPARAARGRRENGNNLCKLDRQVANSNHIFQVCQATHGLRIKRHDEVVDMLKSSMNRKQYSTYKEPRLKYKNTFRKPDLIITKKGKVVILDPIICSDTADLNERRLQKEILYGEEVVLEEARSFVKSHNPGLQIKEIIVHGVPMTFRGSLDNFTVRFLKRLGVPRRYLNLIIVRTLVNTNKMYQAYTRMTTAAR

SEQ ID NO: 818 - protein, 1035 aa, synthetic construct
MFACSECDGSFGNKGALGNHCKWKHAQTRLPERRAGGEFACPDCDNAYDSLGGLNVHRRAKHPDVYHAARQPAARVRARWSYEEMVLVARAELEIRGTNPPRGVVRVLHSRFPDRTFEAIKCLRNKNPRYKEVIAALEAEGVDEEPPTVTPSEQPHASAQADGLWRDQLQMAIDIGHVGVDDLDWVADGCSAEDIRNKLDELFASWVGHLVRGERAPARSHQPAPGVRDPGRELDPRRRRRAQYSAIQHLYGRKPSAAAHKVLDGSWECDDPVPTPTLEEFRMAWQPIFETPSIKDNRRPTCVGQVRWEIVSPVTPDELNKVLTEGASSAPGPDGVKLKDVIGLGTGELCSHFNLWLLCGSQPSALCVGRTIYIPKGSESNDALKYRPITIASHILRVFHKIMARRFDAFLPLKYTQKGFRSGDGIAQHVLSLQAMIDGAKRRCKPVNLVFLDVRKAFDSVSHDTIVLAMPRLGCPDPFLSYIRDLYSRSSTVIEHNGGRSAPIFTRRGVKQGDPLSPFMFNAVIDWAFSSLDDHIGFSFGHVRVNNLGYADDVALLSDTQAGLRSQLGQFESHLAMGGLTISAGTEGKSASLSIAVDGKAKRWVVDQTPFLATNADIIPALSASGEYRYLGTMLGSGGAKVRSSLRKDLLQGLRNISRAPLKPHQRLRILRIFLLPKYLHELVLAPVADGWLNWLDIAIRANVRQWLKLPQDTPVAFIHAGTGDGGLSVPSLRYSVPVMRRKRLEAVHSATDPISTALAASPFFQKELSGLSCKTLGGRLVTDKHSLAQAWAACLHTKVDGRGLSEARFCTEGSGWVSNPPRNQSGANYIGAIKARGGLLCSKVRSARGDSGRDVRCDSCMRPETAQHIIQVCPRTSGPRMRRHDRVVQFVSAAAERAGYKVLVGPRIVGRTLGVRKPDLVLWNERKAYVADVTVTSDQVGGVKAHRDKVAYYDQPEIREWVEKYTGRSDISFSAVAANWRGVLSPLSADFLKSVLKLSNWDVSLLGLRICEETYHIHRYFGKGTYRIRGRGAS

SEQ ID NO: 819 - protein, 1035 aa, synthetic construct
MFACSECDGSFGNKGALGNHCKWKHAQTRLPERRAGGEFACPDCDNAYDSLGGLNVHRRAKHPDVYHAARQPAARVRARWSYEEMVLVARAELEIRGTNPPRGVVRVLHSRFPDRTFEAIKCLRNKNPRYKEVIAALEAEGVDEEPPTVTPSEQPHASAQADGLWRDQLQMAIDIGHVGVDDLDWVADGCSAEDIRNKLDELFASWVGHLVRGERAPARSHQPAPGVRDPGRELDPRRRRRAQYSAIQHLYGRKPSAAAHKVLDGSWECDDPVPTPTLEEFRMAWQPIFETPSIKDNRRPTCVGQVRWEIVSPVTPDELNKVLTEGASSAPGPDGVKLKDVIGLGTGELCSHFNLWLLCGSQPSALCVGRTIYIPKGSESNDALKYRPITIASHILRVFHKIMARRFDAFLPVKYTQKGFRSGDGIAQHVLSLQAIIDGAKRRCKPVNLVFLDVRKAFDSVSHDTIVLAMRRLGCPDPFLSYIRDLYSRSSTVIEHNGGRSAPIFTRRGVKQGDPLSPFMFNAVIDWAFSSLDDHIGFSFGHVRVNNLGYADDVALLSDTQAGLRSQLGQFESHLAMGGLTISAGTEGKSASLSIAVDGKAKRWVVDQTPFLATNADIIPALSASGEYRYLGIMLGSGGAKVRSSLRKDLLQGLRNISRAPLKPHQRLRILRIFLLPKYLHELVLAPVADGWLNWLDIAIRANVRQWLKLPQDTPVAFIHAGTGDGGLSVPSLRYSVPVMRRKRLEAVHSATDPISTALAASPFFQKELSGLSCKTLGGRLVTDKHSLAQAWAACLHTKVDGRGLSEARFCTEGSGWVSNPPRNQSGANYIGAIKARGGLLCSKVRSARGDSGRDVRCDSCMRPETAQHIIQVCPRTSGPRMRRHDRVVQFVSAAAERAGYKVLVEPRIVGRTLGVRKPDLVLWNERKAYVADVTVTSDQVGGVKAHRDKVAYYDQPEIREWVEKYTGRSDIFFSAVAANWRGVLSPLSADFLKSVLKLSNWDVSLLGLRICEETYHIHRYFGKGTYRIRGRGAS

SEQ ID NO: 820 - protein, 1035 aa, synthetic construct
MFACSECDGSFGNKGALGNHCKWKHAQTRLPERRAGGEFACPNCDNAYDSLGGLNVHRRAKHPDVYHAARQPAARVRARWSYEEMVLVARAELEIRGTNPPRGVVRVLHSRFPDRTFEAIKCLRNKNPRYKEVIAALEAEGVDEEPPTVTPSEQPHASAQADGLWRDQLQMAIDIGHVGVDDLDWVADGCSAEDIRNKLDELFASWVGHLVRGERAPARSHQPAPGVRDPGRELDPRRRRRAQYSAIQHLYGRKPSAAAHKVLDGSWECDDPVPTPTLEEFRMAWQPIFETPSIKDNRRPTCVGQVRWEIVSPVTPDELNKVLTEGASSAPGPDGVKLKDVIGLGTGELCSHFNLWLLCGSQPSALCVGRTIYIPKGSESNDALKYRPITIASHILRVFHKIMARRFDAFLPLKYTQKGFRSGDGIAQHVLSLQAMIDGAKRRCKPVNLVFLDVRKAFDSVSHDTIVLAMRRLGCPDPFLSYIRDLYSRSSTVIEHNGGRSAPIFTRRGVKQGDPLSPFMFNAVIDWAFSSLDDHIGFSFGHVRVNNLGYADDVALLSDTQAGLRSQLGQFESHLAMGGLTISAGTEGKSASLSIAVDGKAKRWVVDQTPFLATNADIIPALSASGEYRYLGIMLGSGGAKVRSSLRKDLLQGLRNISRAPLKPHQRLRILRNFLLPKYLHELVLAPVADGWLNWLDIAIRANVRQWLKLPQDTPVAFIHAGTGDGGLSVPSLRYSVPVMRRKRLEAVHSATDPISTALAASPFLQKELSGLSRKTLGGRLVTDKHSLAQAWAACLHTKVDGRGLSEARFCTEGSGWVSNPPRNQSGANYIGAIKARGGLLCSKVRSARGDSGRDVRCDSCMRPETAQHIIQVCPRTSGPRMRRHDRVVQFVSAAAERAGYKVLVEPRIVGRTLGVRKPDLVLWNERKAYVADVTVTSDQVGGVKAHRDKVAYYDQPEIREWVEKYTGRSDISFSAVAANWRGVLSPLSADFLKSVLKLSNWDVSLLGLRICEETYHIHRYFGKGTYRIRGRGAS

SEQ ID NO: 821 - protein, 1035 aa, synthetic construct
MFACSECDGSFGNKGALGNHCKWKHAQTRLPERRAGGEFVCPDCDNAYDSLGGLNVHRRAKHPDVYHAARQPAARVRARWSYEEMVLVARAELEIRGTNPPRGVVRVLHSRFPDRTFEAIKCLRNKNPRYKEVIAALEAEGVDEEPPTVTPSEQPHASAQADGLWRDQLQMAIDIGHVGVDDLDWVADGCSAEDIRNKLDELFASWVGHLVRGERAPARSHQPAPGVRDPGRELDPRRRRRAQYSAIQHLYGRKPSAAAHKVLDGSWECDDPVPTPTLEEFRMAWQPIFETPSIKDNRRPTCVGQVRWEIVSPVTPDELNKVLTEGASSAPGPDGVKLKDVIGLGTGELCSHFNLWLLCGSQPSALCVGRTIYIPKGSESNDALKYRPITIASHILRVFHKIMARRFDAFLPLKYTQKGFRSGDGIAQHVLSLQAMIDGAKRRCKPVNLVFLDVRKAFDSVSHDTIVLAMRRLGCPDPFLSYNRDLYSRSSTVIEHNGGRSAPIFTRRGVKQGDPLSPFMFNAVIDWAFSSLDDHIGFSFGHVRVNNLGYADDVALLSDTQAGLRSQLGQFESHLAMGGLTISAGTEGKSASLSIAVDGKAKRWVVDQTPFLATNADIIPALSASGEYRYLGIMLGSGGAKVRSSLRKDLLQGLRNISRAPLKPHQRLRILRNFLLPKYLHELVLAPVADGWLNWLDIAIRANVRQWLKLPQDTPVAFIHAGTGDGGLSVPSLRYSVPVMRRKRLEAVHSATDPISTALAASPFFQKELSGLSCKTLGGRLVTDKHSLAQAWAACLHTKVDGRGLSEARFCTEGSGWVSNPPRNQSGANYIGAIKARGGLLCSKVRSARGDSGRDVRCDSCMRPETAQHIIQVCPRTSGPRMRRHDRVVQFVSAAAERAGYKVLVEPRIVGRTLGVRKPDLVLWNERKAYVADVTVTSDQVGGVKAHRDKVAYYDQPEIREWVEKYTGRSDISFSAVAANWRGVLSPLSADFLKSVLKLSNWDVSLLGLRICEETYHIHRYFGKGTYRIRGRGAS

SEQ ID NO: 822 - protein, 1035 aa, synthetic construct
MFACGQCERTFGNKGALGNHCKWKHAQTRLPERTNGGEFPCPDCDNAYGSSGGLNVHRRARHPDVYHAARQPAARVKARWSYEELVLVARAELEIRGTNPPQGVVRVLHSRFPDRTFEAIKCLRNKNPRYKEVLAALEVEEVDEGLPTVTPSEQTHAFAQADGLWRDQLRMAINIEHLGVDDLDWVADGCPAEDIRKKLDELFASWVGHLVRGERAPARSHQPAAGVTNPSRELDPRRRRRAQYSAIQHLYGRKPSAAAHKVLDGSWECGDPVPTPTLEDFRMAWQPIFETPSIKDNRRPTCVGQVRWEIVSPVTPGELEKVLTEGASSAPGPDGVKLKDVIGLGIGELCSHFNLWLLCGSQPSAMCVGRTIYIPKGSESNDALKYRPITIASHILRVFHKIMARRFDAFLPLKYTQKGFRSGDGIAQHVLSLQAIIDGAKRQRKPVNLVFLDVRKAFDSVSHDTIVLAMRRLGCPDPFLSYIRDLYSRSSTVIEHNGERSAPIFTRRGVKQGDPLSPFMFNAVIDWAFSSLDDHVGFSFGHVRVNNLGYADDVALLSDTRAGLRSQLGKFESHLAKGGLTISAGTEGKSSSLSIVVDGKAKRWVVDQTPFLATNEGIIPSLSASGEYRYLGIMLGSGGAKVRSSLREELLQGLQNITRAPLKPYQRMRILRNFLLPKYLHELVLAPVADGWLNWLDTAIRANVRQWLKLPQDTPVAFIHAGTGDGGLSVPSLRYSVPVMRRKRLEAVHSATDPLSTALTASPFFQKELSGLSRKTLGGRLVTDKQSLAQAWAGCLYTKVDGRGLSEARSCAEGSRWVSNPPRNQSGANYIGAIKARGGLLYSKVRSARGDSGRDVRCDSCMRPETAQHIIQVCPRTSGPRMRRHDRVVQFVSAAAERAGYKVLVEPRIVGRTLGVRKPDLVLWNESRAYVADVTITSDQVGGVKAHRDKVAYYDQPEIREWVERFTGLSHISFSAVAANWRGVLSPLSADFLKSVLKLSNWDISLLGLRICEETYHIHRYFGRSTYRVRGRGPS

SEQ ID NO: 823 - protein, 1105 aa, synthetic construct
MKCLRYISGLYWKISLLVANMFARLRPGRTSVSDTQNNLNTIGASNEAPTDTFPIGENDNTSSIFVCQYCQKVFQTNRGLANHQRSKHEEIYHASNVPKARKKARWDDEELVLLAREEIRLTDLRVRNINAELIKVLPHRTLESVKGVRRKTNKRYHDLLGKLRSDPSSVVDPNGRAESVRGGAPPEGVFDPGRSWRADDQSLHLDHDSWIAKVRNEIDEFEFLTGLDVGLIKPDCLTEEDKEGVNLDFDRWVESMTVRNRTEVVPPGPKRRGRVGVRREGESTTTTSVGIVPPNARSSKRRKRKHPNSSWGRKAAYKRTQDLFRKNKSRCAQDILSGSWERPRRGLPLEDQEPYWREILEQESVEDLRTPEQVGPVLWSMIDPISSAELEAIMKAMKPGAPGPDGMVLSQLKQLNGEEVRARFNLWLLAGYCPTSCCMGETVLLPKDQNDIRPPKHRPITMANLIVRCYHKLMARRMGELMPISDRQKAFRAGDGLGENVLLLRAIIKHHTRECLPLNVVFLDISKAFDSVSHQSILIAAKRMGVPPPLLSYLHEYYSRSQTRLRVGGRKSEPISVRRGVKQGDPMSVHLFNAVIDWALSTLDPDLGIKLNGVNLNHLAFADDIGLLTKTSVGAQSQIDRLNDHLNKCGLFISAGSTGKSASLKIDVDGRRKLWVVNPNVHLHVADEDIPAKSIGETYEYLGVPLSAKGAIPQSAHKLQKYLDNLTRAPLKPQQRLYILKRHVIPALYHQLVLSDCSKGLLNFLDVKIRGAVKRWLKMPKDTNDFFIHAPVIEGGLGVAVLKNAIPLMRKSRLEKLLGSNDPAVAAVAGTSFVADMLRSDSVPLQVAGIPICNKENLKRALAYGLHRSVDGSGLNKCSQISIANKWVDSPTHLMSGANYIGAIKVRGNLMATAARMARGRPQRDVACDACGRTESLGHILQVCPRTSGARIDRHNSVLARTVKVLVRNHWSVLVEPAIPTPAGIRRPDIIAWKGGSTCYVIDVTVVSDNADLDRVHQLKIEHYNTQHVRDWALRVSGTASVTFSSISFNWRGALAGPSYDLLKNSLALGEYDIVLLATIVMEKGYQTWLDFKRSTFRERSWNNG

SEQ ID NO: 824 - protein, 1112 aa, synthetic construct
MARAHREVTDQATKEDHNSRRLVRWTPAELLDLAEKEALLMKKGVKFMNEALFPLCPGRSLEAIKGQRRKEAYKELVKAELAKLVTEGLCIAGDEGEGASVEGEEGRGEGQGPSRSGPASGTLDTTQRRLNQRIEPERQNDRQNPLLGTEGRATGLAHLRRDALREGQRQIDMTDSQPEGEEHLTPNVAELLQGAEGEVEDGESSCIWTQDVATQEELDEFIRKSTMTIAQRKKAKYEHCRILKGQMELYKDIIGNVWDHEEETGVGADRKVIDDWVREQLLKWVRWEGNPKPKPVRQPDKKQPFISKKKEKARLRQLTQSFYERSPSRCINAVLSGNLEVTQVIPKKELEEYWASIFSRKPEGIVKVDTINRPADTSYSSPISLDEVKEGLRNLKDNSPGPDGLKKSDVAKIPVQVLHAMLLIFQGSSYTPKFLRLGNVTLVPKNAKPENPGQYRPITVTSQLLRLYHGILAKRLVRLPLSKRQKAFLPRDGIAENAFIIEHLIKGARARREDLFLVFMDVAKAFDSLAHTSLLQAAERIGIPASLREYIALVYEEAEIQFKGGEKKIKQTMGIRQGCQKSAPLFDASLDMCYEKLDPRIGYRVPDPAAPQELCSITQKMRPGGYDITEALFADDGVTVAATRIGSVKNTLLAVRELGKCGMKMNPKKCATLAIRANGRLKKSYVDPTPYLTIDGEVVPALKLGETYKYLGLKIGANGYDIREITKKLIVQLDRLSEASFKPQQRLHALKVNVIGGMLHTLVLVHVSLKTLLNIDRTIRRYVRKWLHLQSDTPTAMFHANTADGGLGIPSMVTRIPRLRRARLVKMTQSDDPLIKIMVSSGTGEAAVRLASGIKRLGEVQITNKQSERRAWREELISKTDGRGLQYHDGFGDGWILDPLFPAKGGEFIKALRVRCNDMKTPARAVRGDRGDPTCRLDKQTANATHISQICQVTHGLRVKRHDGIVKMVRAGLQRVGFTVQLEPKIAIEGTFFKPDIVPWKKDKGFVIDPIICGDNCDIEERYRQKVTAYDKDAVKRYVKEEALRVSGATVKAVEVHGFAINFRGGWSTSTQKLLSRLGLGASLKHFISIRTLTTTWTIIQTYGRVSLGHRK

SEQ ID NO: 825 - protein, 1112 aa, synthetic construct
MARAHREVTDQATKEDHNSRRLVRWTPAELLDLAEKEALLMKKGVKFMNEALFPLCPGRSLEAIKGQRRKEAHKELVKAELAKLVTEGLRTAGDEGEGASVEGEEGRGEGQGPSRSGPASGTLDTTQGHLNQRMEPERQNDRQNPRLGTEGRATGLAHLRRDALREGQRQIDMTDSQPEGEEHLTPNVAELLQGAEREVEDGESSCIWTQDVATQEELNEFIRKSTLTTAQSKNAKYEHCRILKGQMELYKDIIGNVWDHEEETGVGADRKVIDDWVREQLLKWVRWEGNPKPKPVRQPDKKQPFISKKKEKARLRQLTQSFYERSPSRCINAVLSGNLEVTQAIPKKELEEYWASIFSRKPEGVVKVDTINRPADTSYSSPISLDEIKEGLRNLKDNSPGPDGLKKSDVAKIPVQVLHAMLLIFQGSSYTPKFLRLGNVTLVPKNAKPENPGQYRPITVTSQLLRLYHGILAKRLVRLPLSKRQKAFLPRDGIAENAFIIEHLIKGARARREDLFLVFMDVAKAFDSLAHTSLLQAAERIGIPSSLREYIALVYEEAEIQFKGGEKKIKQTMGIRQGCQKSAPLFDASLDMCYEKLDPRIGYRVPDPAAPQELCSITQKMRPGGYDITEALFADDGVTVAATRIGSVKNTLLAVRELGKCGMKMNPKKCATLAIRANGRLKKSYVDPTPYLTIDGEVVPALKLGETYKYLGLKIGANGYDIREITKKLIVQLDRLSEASFKPQQRLHALKVNVIGGMLHTLVLVHVSLKTLLNIDRTIRRYVRKWLHLQSDTPTAMFHANTADGGLGIPSMVTRIPRLRRARLVKMTTSDDPLIKIMVSSGTGEAAVRLASGIKRLGGVQIINKQSERRAWREELISKTDGRGLQYHDGFGDGWILDPMFPAKGGEFIKALRVRCNAMKTPARAARGDRGDPTCRLDKQTANATHISQICQVTHGLRVRRHDGIVKMVRAGLQRIGYTVQLEPKIAIEGTFVKPDIVAWRKDKGFVIDPIICGDNCDPEERYRQKVTTYDKEAVRKYVKEEALRVSGANVKEVEVHGFAINFRGGWSTSTQKLLSRLGLGTSLKHFISIRTLTTTWTIIQTYDRVSLGYRK

SEQ ID NO: 826 - protein, 1112 aa, synthetic construct
MARAHREVTDQATKEDHNSRRLVRWTPAELLDLAEKEALLMKKGVKFMNEALFPLCPGRSLEAIKGQRRKEAHKELVKAELAKLVTEGLRTAGDEGEGASVEGEEGRGEGQGPSRSGPASGTLDTTQGHLNQRMEPERQNDRQNPRLGTEGRATGLAHLRRDALREGQRQIDMTDSQPEGEEHLTPNVAELLQGAEREVEDGESSCIWTQDVATQEELNEFIRKSTLTTAQSKNAKYEHCRILKGQMELYKDIIGNVWDHEEETGVGADRKVIDDWVREQLLKWVRWEGNPKPKPVRQPDKKQPFISKKKEKARLRQLTQSFYERSPSRCINAVLSGNLEVTQAIPKKELEEYWASIFSRKPEGVVKVDTINRPADTSYSSPISLDEIKEGLRNLKDNSPGPDGLKKSDVAKIPVQVLHAMLLIFQGSSYTPKFLRLGNVTLVPKNAKPENPGQYRPITVTSQLLRLYHGILAKRLVRLPLSKRQKAFLPRDGIAENAFIIEHLIKGARARREDLFLVFMDVAKAFDSLAHTSLLQAAERIGIPSSLREYIALVYEEAEIQFKGGEKKIKQTMGIRQGCQKSAPLFDASLDMCYEKLDPRIGYRVPDPAAPQELCSITQKMRPGGYDITEALFADDGVTVAATRIGSVKNTLLAVRELGKCGMKMNPKKCASLAIRANGRLKKSYVDPTPYLTIDGEVVPALKLGETYKYLGLKIGANGYDIREITKKLIVQLDRLSEASFKPQQRLHALKVNVIGGMLHTLVLVHVSLKTLLNIDRTIRRYVRKWLHLQSDTPTAMFHANTADGGLGIPSMVTRIPRLRRARLVKMTTSDDPLIKIMVSSGTGEAAVRLASGIKRLGEVQIINKQSERRAWREELLSKTDGRGLQYHDGFGDGWILDPMFPAKGGEFIKALRVRCNAMKTPARAARGDRGDPTCRLDKQTANATHISQICQVTHGLRVRRHDGIVKMVRAGLQRIGYTVQLEPKIAIEGTFVKPDIVAWRKDKGFVIDPIICGDNCDPEERYRQKVMTYDKEAVRKYVKEEALRVSGANVKEVEVHGFAINFRGGWSTSTQKLLSRLGLGTSLKHFISIRTLTTTWTIIQTYDRVSLGYRK

SEQ ID NO: 827 - protein, 976 aa, synthetic construct
MRGLNQHIRRGDAKHQEDYHQQQEVSRTKARWDQEEIYMVAKMELKLIDKGCKSIVKELQRSFPHRSLDAIRSLRTKKEQYKQCIEELKVATTNKNANMESTKEDMAKAGSNTSEERDLDSNGRTLFWENNTEPELELVNNWKMLTERNEEIIRKLIDQDIESWLPPKTKRCQAPSKCKQPCKINAKKKRKQEYASIQNLYRKNRGAAIRKILDGKWKNECTEGPSPKTLQRFWKNLFERHSGNDERQPNMKGPTIWELEAPITKREVDQAKKNQSKDSAPGLDNVTTKQLQAIPSMAIAKRFNAWLVSAYVPNRCRQGVTVLIPKVKGTMLPECHRPITMAPTILRLFHRILTARMMNNLPFSNRQKAFRKGDGIAQNLITIKSIIERSQKKLTSLSLAFLDVQKAFDSVNHSTIIKACRRMGIPNMLLSYIENLYQGSTTRLRIRNKLSPEIWINRGIQQGDPLSVPLFLAVMDWVTSNLDPGIGVSMGEAKINHLAFADDLVILSTTDKGLQQQMDRIIEGLSQCGLNINPKKCATFRLRIDGSKKRWTINPEPFLKCQGTIIPSVTVSTFYKYLGIKIGIMSNTSFITENLEPKLGYLTKAPLKPQQRLYSLIVHLIPGLQHSLTFMRTTKKFLKSLDLRIRAAVRGWLKIPKDVPNAFYYTKIHLGGIGIPQLENIIPLMKTNRIGKFCDDADDFSKEIIRQDALPKMCKNWSNPLKVHGFTVTTKKEIEETIAETLYKTVDGRGLKHESETSTVNRWVSNGTGLLSGRDYIGAIACRGGFLHTRLRAARGFPGATVLCDCCNQTESLGHILQTCYRTHKERINRHNRIRDLTAARIRKKNWNIIKEQAIPTQAGIRKPDLICYKESEAVVLDVTIVNDKFSLEDACKRKIEYYRKEDIIRWIKLETGVITVTFGAVVASWRGCVAESTNRLLTYQFGLTNDFFSLLGAIVCTYGYYEWRHFKNATYRIPR

SEQ ID NO: 828 - protein, 1000 aa, synthetic construct
MPDCLSGEGGDPSRRCPLCSRQFKSKAGLSLHLRKGNKEHQEFYHNSQKVVKTKTRWDEEELYLLASEELRLINNKCKAINKELTNKFPHRTMEAIKGVRRQTKYKQLLDRLRDSELERNLNGEESNSGPMKNDQENRISDISPRSSTNPSISIFWENNHKKELDLLHQWSIFSTCDMEEVKTKIDKDLDELLPSRVLKDNTKLIVTSKKTNKKQKRRKEYALIQKMYRKNRSKTIRKVLDGEWKIKNSTEPKLADLEPFWRNIFEKGSEEDHRNPQCKESVVLELEAPITVEEVEYTKRSQKKDTAAGPDGITCKDVMNISSLKLAQRFNVWMFTGYIPQRNKQGLTVLIPKKKGDMRPESFRPITMMPTVIRLFHRILARRMMAQLPINKQQKAFRKGDGIAFNLITVQALLEHHTKNLKPLSGAFLDIRKAFDSVNHSSLHLACKRIGIPDMLLNYIKTLYTGSTICLRVQGEISDPICVNRGIRQGDPLSVPLFLAIMDWAIDGLNTSLGASIGKERINHLAFADDMVIFAASDLGLQYQITHLEKELSKSGLNFNPSKCSSFRLTIDGKKKKWIMNPDKFLKCAGELIPTIKIGSFYNYLGIKIGCMNNSQFVTDVLEKKLTFLTKAPFKPQQRIYTLIKHLIPSLLHPLTFMSTSNKFLKSLDLRIRSACRKWLKMPKDITKGFFHSEPGVGGLGIPQLEYRIPLLKTKRIANFCNEDNTWGNNLITEKALPNMCTKWLKSMKIDGRIITNKKELDEAISNTLHNSADGRGLKDSSTVKSSNYWVSNGSLLLSGRDYIGALACKGGYLHTGLRALRANKNNNALCDCCGRVESLGHILQSCSRTHNHRLARHNRIRDILASRVRKKDWSILKEQAIPTSAGIRRPDLIFFKDNLALVVDVTIVADTANMFEPYEHKVRYYKTTEITNWIKQETGCTDIEYGALVINWRGAICKNSYDLLDTYWKFPGDFYSLLSAITCTYGYYSWRHFKTSTYR

SEQ ID NO: 829 - protein, 979 aa, synthetic construct
MAANPVNDQGKPSQHFPCDGECIICTPRHDAGDPSAARDKFRHAFIGKRRLVKHLKDVHGVREQDITWRCQRCHELHTTYIEASVHFAQCRPRSINGDVEGIGAVTDCRRSSDPEADALERRGTVEGDLIQRSGRNPEGDVERTPSQTRNEQTEILEEPIPPPIHERPVEHQAETNIHICPECQRVFDTKAGLQLHRRNAHREAYNRTLPEPSRRAQFPEEVLRDIAGACLDHPGRAACGKGISQYAVSRFPAYSAEQINALRKRSKYREVELKVRQEREAAVRNAAAVDIPTPDETPHVAGRRERSPEGGLPPPEVPPRDERRTERVERPENLRTEAERRAWDYYDAVCEGGDMNALYEELMEELVTPYRERGRAPRPHRGNQGARAQGPGPSNTATEPATPLIANRNQRKRARYALHQKLYRKGPSALMSELRDPGSTGVTTLPDTAEVARVYGDRFGSDSPQDTHAFQPKAGAEVVELKPFSRGEVLDVIKGIKLDSAAGPDLVTSKMIFEWGVDVLRPIVNSFLRLGRIPDSLRINRTTLIPKKADPESVNDYRPITIGSLVNRAYAKLLTKRLCDKVSLNSRQKAFVPVDGCSEHLFVVGEALEICQKRRKECNLVFLDLAKAFDMVSHCSITRALNRFGVGSGFVEIVADLYAGVSTVIRGKQGPTDQINMARGVKQGCPLSPMLFNMVMDELVDQLGPRHGLKPRPELEAFNCLAFADDLVIASGTVHGMTQLLVTVREFFDDRSMSVNAAKSHTIRLAPAPGTRTVKVVEGSTFSYGGTPIMNRSINETVKYLGLALSPKGPTNFKRDKAVTDLKLIREAALKPEQKLDLIRRILLPAQMHTLRLSRRVLLRELDQLDRIVRRTVRGILHLPPGTPKAFFYMKSVDGGLALPEVTSTVGYTRLKRFVRLKANGDPLVAKYAAASNKLERELRYWVGALGIEDTSLSRLNTAIFYYALVCANAKYKQIFHQK

SEQ ID NO: 830 - protein, 1121 aa, synthetic construct
MEKSSCRICQEDLPENNLQIREHINDVHNIAEIIYRCKLCTKNYNTISSIKSHYPACKRKIGTNIPPNNTIRNIASQVAPPPTPAPTTTNTNNNIAFQCKECQKGNVTFVAKDNKGLVTHMRTKHVQAYEESKKVANIRIAWSNDEDRILASLELQLKAVHKGQILERLTTEWQKLVQESRANVRSKEAIRGRRQQTEYKRTLEELSNTPNGQPTPTTRSPQGQTTTTDNASSVNVDSESIGEIKEALKTYLTAGHTNLTDHMKDAINGFIDNTNSVDPVQLTMSGIMESITTMRNRVGARNQRIPNIPKKTTKNQTRKRKAEMRAYYQKLYAHNKSRLMDEIIEGVAPNTEPPPIHETVKFYENIWSVRAEDNHAVSKKTGIAGDNRTLLSPITKPEILTAISKTKRDSAKGIDTITLHEAKQLANDDLFVAFNIWLGCKSIPAALKLNRTTLIPKGNQNLDKVTNWRPITISSILLRLFNKIMAGRMSKFFQMDKRQLGFTPINGCSMNIAWLNLLLKHARLNKKEINVCLIDVAKAFDSVPHDSIFRALRRHNAPPHLIELIQQQYEDSSTTITYQNLSSKKIKILRGVKQGDALSPLLFNLVTDELFQILGDRFGYTIDNIGSTNIRCFADDMCLVSGTKVGMGNMIRESTQFLNERGLQINPNKCMTIALEKGYKGKKSKIVIEPVFTIQGAPVPILGHTTNTTKYLGVKFTSVGSIKATVIKEQLISVLEKLQKVSLKPFQKIDLLRSHVIPLFVYQLINLELYPKLVKQIDLIIRRTIRSILHLPTSLSNEFFYLSVREGGLGFPVLKNSIGLAKVRIYKSIMRSEDEFLKHLIETHGFPIIRRFLDDLQVSSSFENDDLAQRKRELKIERNNSFAQKVHGYGSEIFAKCPLTNSWLHAGYKTLTGRNYINGIKLRTNTFETKVTTNRGLAVDKTCRRCHKENESLMHVIQFCNNTKGLRYRRHNQICSRICQKLRERGFDVFSEKAFTTDVTGLPNLLRPDIIAKKDGKAIIIDVQCVYESTTGSFTNAANSKIQKYTPLIEAVKNQLNCTEVEVTAMIVGSRGSFHRGHLHQWYQMGFSTTELKYLALNCMENSIRILLSFNRGCQGSTDNP

SEQ ID NO: 831 - protein, 1121 aa, synthetic construct
MEKSSCRICQEDLPENNLQIREHINDVHNIAEIIYRCKLCTKNYNTISSIKSHYPACKRKIGTNIPPNNTIRNIAPQVAPPPTPAPTTTNTNNNIAFQCKECQKGNVTFVAKDNKGLVTHMRTKHVQAYEESKKVANIRIAWSNDEDRILASLEIQLKAVHKGQILERLTTEWQKLVQESRANVRSKEAIRGRRQQTEYKRTLEELSNTTNGQPTPTTRSPQGQTTTTDNASSVNVDSESIGEIKEALKTYLTAGHTNLTDHMKDAINGFIDNTNSVDPVQLTMSGIMESITTMRNRVGARNQRIPNIPKKATRNQTRKRKAEMRAYYQKLYAHNKSRLMDEIIEGVAPNTEPPPIHETVKFYENIWSVRAEDNHAVSKKTGIAGDNRTLLSPITKPEILTAISKTKRDSAKGIDTITLHEAKQVANDDLFVAFNIWLGCKSIPAALKLNRTTLIPKGNQNLDKVTNWRPITISSILLRLFNKIMAGRMSKFFQMDKRQLGFTPINGCSMNIAWLNLLLKHARLNKKEINVCLIDVAKAFDSVPHDSIFRALRRHNAPPHLIELIQQQYEDSSTTITYQNLSSKKIKILRGVKQGDALSPLLFNLVTDELFQILGDRFGYTIDNIGSTNIRCFADDMCLVSGTKVGMGNMIRESTQFLNERGLQINPNKCMTIALEKGYKGKKSKIVIEPVFTIQGAPVPILGHTTNTTKYLGVKFTSVGSIKATVIKEQLISVLEKLQKVSLKPFQKIDLLRSHVIPLFVYQLINLELYPKLVKQIDLIIRRTIRSILHLPTSLSNEFFYLSVREGGLGFPVLRNSIGLAKVRIYKSIMRSEDEFLKHLIETHGFPIIRRFLDDLQVSSSFENDDLAQRKRELKIERNNSFAQKVHGYGSEIFAKCPLTNSWLHAGYKTLTGRNYINGIKLRTNTFETKVTTTRGLAVDKTCRRCHKENESLMHVIQFCNNTKGLRYRRHNQICSRICQKLRERGFDVFSEKAFTTDVTGLPNLLRPDIIAKKDGKAIIIDVQCVYESTTGSFTNAANSKIQKYTPLIEAVKNQLNCTEVEVTAMIVGSRGSFHRGHLHQWYQMGFSTTELKYLALNCMENSIRILLSFNRGCQGSTDNP

SEQ ID NO: 832 - protein, 1085 aa, synthetic construct
MYRVAAVNSRGTGSNNNNQALLSRTSSLIKIASERPIDVLALTETHHSNVHNDLSAAAQESGYSIAAHSQRPQSGRNSYAGIILLCRRDSVTRTTQLPPFTDEALSGRALAVTVEFADASTWNLLFVYAPATNRLRPAFFKLLASSLPEGFTPDMCIGDFNMNANRPTPKYFVKFCSNVDLHDSWEPNGDCPWFTFHRNKFRSRIDLSLISAPMLKSQRVITTHQVLHSKLDHLAVISEISHLPCVHTPCSNKKFRLFDPSLASSKLLNMDIEKACKEYRHDQCIELYDRILNICNMHDEMTTQRKRRLARERRLLAEANSTDLDTCIAQSIKREIQALESTTGRIQDALNLKNSLAPGKYGYIKHVMRNALPESSIGALIDQNNTLRDASEAHLVLGETLNNVCGTTIPTDITYLDKFGEHWPDEMKCSMEHVTSTISLNEMETTLKGLEGAKSPGPDRLPAWLFKRFAKQLAPFLVNLMNGILDGDEMPECFKESRTIYILKKQGLDKTITSNYRPISLMNVIAKVFASIINRRLRHKIELVISKSQHGFTPNRSILDAILNVDTILKSLKDDGKASAVFLDIAKAFDSVEHSAILYAMKCAGFNDTVVQLINRWISNNHTTVIVNGKKSSPIHLARGVRQGDPLSPILFVLTMDLLHKRITGRIKGIKPMKDFERIPIAGFADDTALFPRNDFQLKRCMSMLRHFKLATGMEIAIHKCSYVTKNENSEKRLHNLNMKPIPNITDKDTERYLGAELHSAGVKDTLSIRIDKAIKKMEMLRGIKYIHQRAKVVKTFIWPMLYYWFSFEELSKEDANRLNTATWNYVYTGHPSFKSKLSKIKRQQDANKFSDGGIGLFDIWEFANHQNAKQYNTALSKQNDQVWAHKWINKPNKKARNFKKKWKKATYEQNMKDLNEWKKYQPKPPEIKLECQTSKPKIWNKIISLPVHPTVKNFIFKRCRRMVRTVKECIYCQESGYTHIIHGECQMNQGNKYSMEDFLNSFNNRKHNQGLDWSGVTPHVTPAEVANTWYANWFTYQAENNWLDGEHTNTPPSTTESSNAIRAKVLETLSQITGQLTPNPLGSM

SEQ ID NO: 833 - protein, 1200 aa, synthetic construct
MHESQAHQPEYKKELESKHDDKQPEHVSLEKLAALEATSKVVSIKAMTAATGLTTHQVRYLREKAIYKQYLDKAKKEQAAKAKSIFKAAPKPSTLLSTASRIVPTASASGASRKTAVQPPNALPTQARRETPPASDASTCTACTKVTTSGRDHTPLPPAATTQPSPPSHIFTEDNKRRRISSPSLPPGLASDTKKKRTMGSPQRPTPPCRQTIQTSGTAAATLSRTKQQQATLGIVPPAAASKPSSVSAPPAASAAANTPKRQRSPSQSPQAQQAPALRAAHTRILSPNTNTPTSQPTGSRTPLNPASTPRRDKMEAEFRQALEATLVVEEPCPGLHKIVRSALSDSPDRLQIAIDDFYENAWVREKPRKARKPPRPPHNYGNLHHGRGRRAAEYKKAQDMFARDKKGLADVILEGKELLTPPELPSLASTEDLFAGIWESGSTSDQQRPYVPHFSARALPPIFANDVELARERWHRAGAGLDGITIPQVCRMDPNMLATLFNIIIMRGIFPSAWRDLRTVLIHKGGIRSDPNNWRPISIASALQRLFHRILLRHLSAITSLDHSQRGFRSVDGTFANAVLLDGYIRSRRAAGKSFNIVGLDLRKAFDSVSHEAIRTAIANAGVDHRLAGYLLATFQGSRTHLELGPSRSRPIHLLRGVKQGDPLSPLLFNLVLDPMLTYLATNFKGGTLPGGAKVPAIAFADDIFLLSDDDSEIPLMLYAFGEYLAQQGLAVNPRKCVSISATTVQGKTMVRTKCLFRIGGALIPTVGSVNTFKYMGHQFGERGLQQSSLTTLNTWLERLSRAPLKPHQRMALLRDHVIPKLLHGLTSPVTTGEKLREADRMIRRFVKRTLHLQEHTANQFIHARLRDGGLGITELRRAVPEITLKRCRGLLTVPDDPTLASFGSSEYFETILARVSRLAGARPCHEVHREQIRTGAFSAGLELVSDDIASRQWLTTKPQGWTGRDFVKAVHLRTNNLPTMDHPSNPPHLRLCRAGCQKNESVKHILQQCQQVDGLRSKRHNEIAAKIARAASKKWEVEWEPRVLGLPDINNKRQLFKPDLAIHKPEHLVIVDVQVSWENSEASIREAWDVKRAKYSSPEFLAAAERRWPGRRITTLPLILGARGIWPNINRVTADELQLSAAVKRSCVESCLKWGPSMHRTFMAGVWASSREGRPNGIGYRSARRPTNNQSAISSRGG

SEQ ID NO: 834 - protein, 1200 aa, synthetic construct
MHESQAHQPEYKKELESKHDDKQPEHVSLEKLAALEATSKVVSIKAMTAATGLTTHQVRYLREKAIYKQYLDKAKKEQAAKAKSIFKAAPKPSTLLSTASRIVPTASASGASRKTAVQPPNALPTQARRETPPASDASTCTACTKVTTSGRDHTPLPPAATTQPSPPSHIFTEDNKRRRISSPSLPPGLASDTKKKRTMGSPQRPTPPCRQTIQTSGTAAATLSRTKQQQATLGIVPPAAASKPSSVSAPPAASAAANTPKRQRSPSQSPQAQQAPALRAAHTRILSPNTNTPTSQPTGSRTPLNPASTPRRDKMEAEFRQALEATLVVEEPCPGLHKIVRSALSDSPDRLQIAIDDFYENAWVREKPRKARKPPRPPHNYGNLHHGRGRRAAEYKKAQDMFARDKKGLADVILEGKELLTPPELPSLASTEDLFAGIWESGSTSDQQRPYVPHFSARALPPIFANDVELARERWHRAGAGLDGITIPQVCRMDPNMLATLFNIIIMRGIFPSAWRDLRTVLIHKGGIRSDPNNWRPISIASALQRLFHRILLRHLSAITSLDHSQRGFRSVDGTFANAVLLDGYIRSRRAAGKSFNIVGLDLRKAFDSVSHEAIRTAIANAGVDHRLAGYLLATFQGSRTHLELGPSRSRPIHLLRGVKQGDPLSPLLFNLVLDPMLTYLATNFKGGTLPGGAKVPAIAFADDIFLLSDDDSEIPLMLYAFGEYLAQQGLAVNPRKCVSISATTVQGKTMVRTKSLFRIGGALIPTVGSVNTFKYMGHQFGERGLQQSSLTTLNTWLERLSRAPLKPHQRMALLRDHVIPKLLHGLTSPVTTGEKLREADRMIRRFVKRTLHLQEHTANQFIHARLRDGGLGITELRRAVPEITLKRCRGLLTVPDDPTLASFGSSEYFETILARVSRLAGARPCHEVHREQIRTGAFSAGLELVSDDIASRQWLTTKPQGWTGRDFVKAVHLRTNNLPTMDHPSNPPHLRLCRAGCQKNESVKHILQQCQQVDGLRSKRHNEIAAKIARAASKKWEVEWEPRVLGLPDINNKRQLFKPDLAIHKPEHLVIVDVQVSWENSEASIREAWDVKRAKYSSPEFLAAAERRWPGRRITTLPLILGARGIWPNINRVTADELQLSAAVKRSCVESCLKWGPSMHRTFMAGVWASSREGRPNGIGYRSARRPTNNQSAISSRGG

SEQ ID NO: 835 - protein, 1200 aa, synthetic construct
MHESQAHQPEYKKELESKHDDKQPEHVSLEKLAALEATSKVVSIKAMTAATGLTTHQVRYLREKAIYKQYLDKAKKEQAAKAKSIFKAAPKPSTLLSTASRIVPTASASGASRKTAVQPPNALPTQARRDTPPASDASTSTACTKVTTSGRDHTPLPPAATTQPSPPSHIFTEDNKRRRISSPSLPPGLASDTKKKRTMGSPQRPTPPCRQTIQTSGTAAATLSRTKQQQATLGIVPPAAASKPSSVSAPPAASAAANTPKRLRSPSLSPQAQQAPALRAAHTRILSPNTNTPTSQPTGSRTPLNPASTPRRDKMEAEFRQALEATLVVEEPCPGLHKIVRSALSDSPDRLQIAIDDFYENAWVREKPRKARKPPRPPHNYGNLHHGRGRRAAEYKKAQDMFARDKKGLADVILEGKELLTPPELPSLASTEDLFAGIWESGSTSDQQRPYVPHFSARALPPIFANDVELARERWHRAGAGLDGITIPQVCRMDPNMLATLFNIIIMRGIFPSAWRDLRTVLIHKGGIRSDPNNWRPISIASALQRLFHRILLRHLSAITSLDHSQRGFRSVDGTFANAVLLDGYIRSRRAAGKSFNIVGLDLRKAFDSVSHEAIRTAIANAGVDHRLARYLLATFQGSRTHLELGPSRSRPIHLLRGVKQGDPLSPLLFNLVLDPMLTYLATNFKGGTLPGGAKVPAIAFADDIFLLSDDDSEIPLMLYAFGEYLAQQGLAVNPRKCVSISATTVQGKTMVRTKSLFRIGGALIPTVGSVNTFKYMGHQFGERGLQQSSLTTLNTWLERLSRAPLKPHQRMALLRDHVIPKLLHGLTSPVTTGEKLREADRMIRRFVKRTLHLQEHTANQFIHARLRDGGLGITELRRAVPEITLKRCRGLLTVPDDPTLASFGSSEYFETILARVSRLAGARPCHEVHREQIRTGAFSAGLELVSDDIASRQWLTTKPQGWTGRDFVKAVHLRTNNLPTMDHPSNPPHLRLCRAGCQKNESVKHILQQCQQVDGLRSKRHNEIAAKIARAASKKWEVEWEPRVLGLPDINNKRQLFKPDLAIHKPEHLVIVDVQVSWENSEASIREAWDVKRAKYSSPEFLAAAERRWPGRRITTLPLILGARGIWPNINRVTADELQLSAAVKRSCVESCLKWGPSMHRTFMAGVWASSREGRPNGIGYRSARRPTNNQSAISSRGG

SEQ ID NO: 836 - protein, 1246 aa, synthetic construct
MGDRVKTAQDAGSKTSSCQRDAPPANAQFVCVSCNSRFDRKSSLSLHSKSCGNTRTKCNYCTVSLTTYKLIRQHERRHHNAEYMRDLEAEKPTPDSAYFAKLAAMEAAAKGGVVSIAAMVTATGLTTHQIRTKRSKPVYQKYLEMAKRDQVAKSKLLFGATSSATSPSTSTSVTNATTTASPPSRAVTVSRQHSADGTAPRKNASSSYTRGPCPKASTSASPPGPPPPSVARIETQTDDGKRRRLSSPTVPAGVPTSERKKKRLQGSPLRPTTSRLLPNTTSASATGLPADTPQENASPGPDPPPAAPNKPADRPPAPLGDESALQQPEAPITSCKRLRSPSLSPAMPLAPALRRTSATVTPLRTRLPHAPPPRLNRDSAMASEFRLALEAVLEAEEPCPGIHRLVTSALSDNNSMFQARLDEFWAATWPTTTSRERRRPPRPSGYGSVHHGKGTRAAEYKKAQELFGKDKRGLANTILEGRPILTPPEVPSIQQVEDVFAAIWEADVADGPIAATSPHIPVPSMPPIFEADVQLAREHWMKSAPGPDGITVAQVCRMNPRVLATVFNILLLRAAVPSSWRVLRTVLIHKGGSRTDPNNWRPLTIASTLQRLFHRVLLRHLTSHTTLHPSQRGFRSVDGTFANAVILDAYIKSRTGQGKAWNIVGIDLSKAFDSVSHNAISKALALAGVDERLATYIITSLTGCATQLDLGGKKSRPINIQRGVKQGDPLSPLLFNLVLDPILQHISTCFKGGTIPGGDKVPVIAFADDLFLLADDDLEIPLMLHMLEEYLTQQGLRINARKCVSISAATIAGKSVVRSKSHYRISESLIPCVGNMNSFKYMGHQFSEKGMMPYNLGNLRTWLERVLKAPLKPHQKMCLLKDHVIPKVLHGLSSPATTGDKLREADRLIRRFVKRALHLQIHTANHLIHARIRDGGLGVLELRKTIPEVSLRRCRGIANATSDPVLASFTSSDHFLKLVNKLEKLAGTVPSTEANRSLIITSPSSSGLEAAADDPASRQWLQSLPQGWTGRDFVRAVHLRTGNLPTRDHHSNPPELRKCRDGCEENESLRHILQLCPRVQAHRIRRHNEIASKVANAMRRKWTVEWEPHVKHEDRKLYKPDMAIHLPDQLVIVDVQVAWEWKENSLAVAWDAKRNKYTTPHFMEAAARRWPGRRVTTLPVILGARGIWPSCNRTTVNTLNLSSALRRSCVESCLKWGSTIHKQFMASVFSQSTRSRPQGLSSRDAG

SEQ ID NO: 837 - protein, 1174 aa, synthetic construct
MNSTPKSLASDERLCAIDLVPASEGSIGCNGARPSRSTDNEPGLSQDYILEIPFTQRACAYCITSGEGTFMALSLADEDRHAREKHAERTRVYKCTQCNKTYKTRRGGENHVAKCTGPPSPRANALLCNECGASFNNQLGLSQHQRHAHPATRNELRVAEFAPKERKSSGGPVFSSEDVELMLELEVRFREQRYIAKLMSEFLPGRTLAQIRNKRREAAYKRRLFESSAIEIDEADVTDEASSECLPSSTSHDDQDFPEVFGNSPNNNADPSPPEQPWREGIINSALSYMPVKQTPAGSETIITLLKEALAHCKANQGIITQEYTDRVYNEVLAHFMPKAGKETGSETKRKRTKGNGGRLARRKYIYARTQELYKKNPSLVAKMVREGKTHLDEQKCSVEMTEVKELYDSLWGTEPKTNKALWCDGGEDNHVSHRVPLEEAIPYITTSEVAKQIARTRTGVAPGPDGLKKGQLNHGSHPYILHLLFNLIATSGQQPTEWRKNRTTLIPKDGKDGSKAENYRPLTISSLLSRLYWGIIDSKLRVVTKFSTRQKGFVSEAGCFNNVHIFNELLRHSKANQGMVATILDVSKAFDTVPHSAIGPALKKLGLDEWVVRLVEDGYANVQTEISHNDGPININLKRGVKQGDPLSPFLFNAVLDSLLHKLENCPGYKITETEQISVLAFADDLILVSTDVRQAKILLAKTEAYLNSLDMKLAAAKCSAFRIQKHKDTWSLTNPELRLKGGDIPFANADLNITYLGAKISPWKGINIEGLESSFISCLHRTMKLKLKPAQKVALITTYHIPHYLYPLTLAIPSQNVLRRLDQALRNTIKQIYHLPQSTANGLLYCGKKDGGLGIPRLEVVARAATLKTGLRFGASADPVMRALFDNGLSSQLKTVAQASRLPWPVTIKEVDTFKLRARKRELAEWSTLKSQGKSVRSLTDDPIGNAWLTDTSLLKPCRMVTALKMRSNVTAARVSLNRAIPQSDLNCRKCGTKLETLGHILGECTHTKPQRIRRHDEIVDFITNEITKRDKKAAVTKEPSIALPTGGNLKPDLVTENRGRVYVVDVSVRHEDKDYLARGRKDKINKYQKLLPDLQSRFGATAGEVLPILVGTRGAMPKETLDALKKLGITDRKSLLTISLIAHRCSIEIYHQFMDYDAHSKRNGAEEGRRP

SEQ ID NO: 838 - protein, 1339 aa, synthetic construct
MGKLVYKTTMHHPVPRGGAGAHDDGVTCDRCGKVCKSRGGLKLHRRACLTGGVSGLSSAQAPAGGVVSPDRTSLGKGSSRNGSASGLSSARSPTTDVSRTISAREGRDEGGNSIVGGLRADALECRVVVERLATTRPPATVSDSVAATIVGGNRADALECREAVDPVPASRPPDSEVASAVLQVESDGLLAAGGPPSDASSPEESRAGVRSRPGVLCGSCGRSFGDKRGLSQHERVAHPADYHSRLAIGHRTGSKRRWTYEEKVLVARAEVSLSGTESLNAKLSLAFPERTFDAIKSLRRNPAYRALVHEIRSEGAGGADGSATASAASDPSGGAGASGVTPECSAQGAPGVPASQEEAIRELADACRADSDALCLSPEELGELIALVDSSVRDPSGPSGQRVQALVDKEYDQWVKSLPIPQPKASQSVPEHSGASSCRGRRRRPRGARPTPGSPGVRTLSKRQQRRRLYGIVQELYRKNRTRCAKTVLSGDWAKEKRTTSLEEQDSYWRPLFEEPSKADSRDPRPVSRALFEISQPVTATEYGLVLKSTHESSPGLDRVDRKVLRGIGPRIGVAHMNLWLLACRPPGAFKVGVTVPLPKSADAADPAEFRPITMATMVCRLFHRLLAHRAERHLPLGARQKAFREGDGLADNVWILRSLIEDCKARHRPLCVTFVDVRKAFDTVSHESVVTAAERIGFPPGLVSYIQCLYTGGVTQLRVGRVLGSPIHPARGVRQGDPLSPLLFCAVMHWVLSQLDARLGLQLAGGVRVNHLAFADDVALMSSCPIAMKRLLCELESGMEMVGLRPNAAKSASLRISVSGKVGKWFCHPEPFLSLAGGPVPAIDIQGSYKYLGIRTGAGRKVGEAVTNKLEEGLEQLSKAPLKPEQRLFFLRVHVLPSLYHETALCKYSKGLLKNLDRESRAAARRWLHLPHDVPQALFHASPDEGGLGLPELLVQVPLMRRARVEKLFQRATEDRDPVLAAVIGMSRELRRERQRWEGGVPCYSRKVTDRTGRGRATAAALHQSCDGCGLSDTREVPAVSRWVTSGTRVASGKSFVDAVHIRAGCLYSKVRASRGRSGAPGAVDLQCEVCPARRETLAHVVQQCPRSAHARDERHNRVAKLLIQKLTASGFQVEAEPAIKTDYGVRRPDVVAYKPGEKAVIIDVTVVADLPGELSNAHDRKSNKYDDPQIRAWVARRSGVSTTAVSLTSLTFNWRGALHGRSAQDMVSLGVSLGTLEVMSLIVLEWGHRAWRESRDATWIRMDQVPYCPASSRSRDETGPHHHTGSSRRRHLAARPPQPVCPRGTGRHGRPVQAGTPGRGRHQPGPAGARGVVPSSR

SEQ ID NO: 839 - protein, 1261 aa, synthetic construct
MNSIAHTFGGLGPDHRLNRPRPRGPPFGGTDPDHRRNSGGRSIDEHGLEPDTGHGDVTDALQLANSNEIILPVPFDSKSCEACLKQRKGDFILLNLNAAVQHARSHHCGVGVLYACKTCGKTYKTKHAAQCHVPKCSGPATSEGKSVICGLCSQAFKTQRGLSQHERLIHPVERNAKREMAGTGKTGRGLNKGYGKVWQKEEVEIMLRLEKTLKGHPQIAKQMMEHLPGKTSKQIRDKRKEASYKALVEHCVSTPGHSSNPGPLESICSSSDSETEIRPVPTIGHVSETEDEISSDEGQYTRQLSPASPVIGQTSLAQRQLTETTQRPGLLLQAGEGPSPIHNEAASPEHKHTRPQSPIGAGEIPGDEDKAEHEWRNDIIRQAVADTKENSTISSKCRELRSRMISILTDIGEGGPLATQTLIDDVYAQVLEQIESTQATRASKRSRRKGPKTQAGSKRRRKRYRYARTQDLFRKNPNLLARYVREGTPWLENEDSSSPKPEDVKSFYSCLWGAAPNITIPFSVTGFGRKALELGEVFQAITARDINERLKHTRHNTASGPDGIERKHITGLDLREILRIFFNIILVSKIQPKAWNTNRTILIPKQGKDGSRVENYRPLTIGSLICRTYWGIVDRKLREVVSFSPRQKGFVHETGCFNNVHILNETIKAAKQSKGLVAVQLDVAKAFDTVPHAAIEAALRRLGLPTGVRESIMNSYTSLTTTIEYAESRTEVSLKRGVKQGDPLSPFIFNAIVDNLLEPLEQMKGYVIDESHSLSALAFADDLILLATTKDKAQSLLHHTESYLKNLGMRIAAEKCASFEIRCTKDSWYIANPDLCLSNGDKIPNSAADSSLCYLGGHISPWSGLRYNDLVAQLETTLERCRSAHLKPHQKLSLTTTHLIPHFLHKTVLATPPITTVRAMDQTIRNHVKVVLHLPMSTPNGLLYCSKRDGGLGIPKLETIVTSSALKQGITLLNSLDPAIHALLQESKLEQRLESLAKHARLQWPILNLRVIDSHKKRMKTDELKAWGQLRSKGKGVASFADDRNGNAWLYNPNLLKPSRFLTALRLRGGMTSDKVTMNKVVPQLNVKCRKCRACNETLAHILGQCIYTKAQRIRRHDEIRDYVSKKLASMKEVQIIEEALIPTPTGNLKPDLVVVNQGRVHVVDVTVRHEDTGYLDEGHKSKVEKYTPLLEILAEQLKVDRGRVLPLVVGTRGCMPVATIDSLREININDRGSYITISLLALRSSIEIYHTFMDYNALVA

SEQ ID NO: 840 - protein, 1158 aa, synthetic construct
MGSLNLREDMDNENGNGYDPAHRHRHNRGSEDGNPSEDLDAENGNATDALQRDATTEIILPIPFTSTSCATCLRHRKGDYILLNINAATQHARSHHGGIEVKYSCSKCGKTYKSKHATQCHVPKCTGPPTREANNAICGICKQGFKTQRGLSQHERLVHPAARNEKREQAATSRGSHKTNKGYGKVWRKDEVDTMLRLEKTLQGHPHIAKQMMEHLPGKTAKQIRDKRKEPSYKALTEQYYSETEKPRESTRTSSDSEEEIRPVTRKRYALETEDEYSTDLEQEPRQPDHSPAATGQTSLAHEQPIEEQLPHLMRPACEGPNTSNAETTEQRPASPQSPIRVGGTPGNEDGAEQQWQTDILRQTLAATSEDLPVSSKCKDLHLRLVSLLKEIGDEQQPVTQALIDDIYAQVLAQIETTQTKRTAKFTKRQGPKTQAGRKRKRKRYEYARTQDLFRKDPKLLAKYIREGTPWLEEKDPSSPTPKDVKSFYSTLWGAAPNITIPFAVTGLGRIARDIGEVFQAITTRDINERLKYTRQNTASGPDGIQRKHLTGSDTKEILRILYNIILVSKIQPRAWNTNRTILIPKQGKDGSRVENYRPLTIGSLICRTYWGIIDKKLREVTSFSPRQKGFVREAGCFNNVHILNEIIRAAKKKKGLVAIQLDIAKAFDTVPHKAVEAALKRLGLPMGVRESIMNSYKDLTTAIEYAGSKIEVPLLRGVKQRDPLSPFIFNAIIDPLLEDLEQMKGYMIDESHYLSALAFADDLILLASSKEKALSLLHRTESFLTNLGMRIAAEKCASFEIKTTKDSWYIASPDLSLTNGDKIPSSAADSTLCYLGGHISPWSGLQYEALVAKLETTLERCRSAQLKPHQKLSLTATYLVPHFLYQTTLVTPPVKTLRALDQTIRNHVKVVLHLPMSTPNGLLYCSKRDGGLGIPKMETLAACSALKQGITLLNSLDPTTRALLQETKLEQRLENLAKTMRLPWPILNVRAIDSYKMRMKKDELKAWSLLPTKGRGVTAFADDRNGNAWLYNPYLLKPSRFLTALRLRGGMTSDKVTMNKVVPQTFVRCRDAESSVEDLGTGRGVVLGRAVATLRSRLEDSSCRRDETSSHFFCFRAVRGSGMKANFFKVPPCVVVVPRLPHPRLQPHHSLSSSFIY

SEQ ID NO: 841 - protein, 1207 aa, synthetic construct
MDTERGDVPDALQNADKHEIILTVPFDSKSCGTCLNQGKGDFILLNLNAALQHAKSHHCGVGVTYACKTCGKTYKTKHAAQCHVPKCSGPLTAEGKTVICGLCRQAFKTQRGLSQHERLIHPVERNAKREMAETGKSGRGLSKGYGKVWQKEEVETMLRLEKSLKGHPQIAKQMMEHLPGKTAKQIRDKRKEASYKALVEHCPPTPRPEPLESICSSSDSEPEIRIVPTIGHVSESEDEISSDEGQCTRKLSPKSPAICQSRLAQRQLTETTQPGLSLLAGESPSPRHIETVSPERMHTRPQSTIGAGESPGDEDKAEHEWRVEIVRQAVAETKENSTLAKKCRDLHLRMISILTDIGEGGPLATQTLIDDVYAQVLEQIESTQTTRASKRSRRKGPNTQAGSKRRRKRYRYARTQDLFRKNPNLLARYVREGTPWLESEDSSSPKPEEVKSFYSSLWGAAPNIQIPFSVTGFGRKALELGEVFQAITVRDINERLKHTRHNTASGPDGIQRKHITGLDMREILRILFNIIMVSKIQPKAWNTNRTILIPKQGKDGSRVENYRPLTIGSLICRMYWGIVDKKLREVVSFSPRQKGFVHETGCFNNVHILNETIKAAKQSKGLVAIQLDVAKAFDTVPHAAIEAALERLGLPNGVRESIMNSYGSLSTTIEFAGSKTEVSLKRGVKQGDPLSPFIFNAIVDPLLEQLEQMKGYVIDESHSLSALAFADDLILLATTKDKAQNLLHHTESYLNDLGMRIAAEKCASFEIRSTKDSWYIANPDLCLSNGDKIPNSAADSSLCYLGGHISPWSGLRYNDLVAQLETTLERCRSAQLKPHQKLSLTTTHLIPHFLHKTVLATPPITTIRAMDQTIRNHVKVVLHLPMSTPNGLLYCSKRDGGLGIPKLETIVTSSALKQGITLLNSLDPAIHALLKESKLEQRLEGLAKHARLQWPILNFRVIDSHKKRMKTEELKAWSQLRSKGKGVASFADDRNGNAWLYNPNLLKPSRFLTALRLRGGMTSDKVTMNKLVPQSNVKCRKCRACNETLAHILGQCVYTKSQRIRRHDEIRDYVSKKLASMKEVQIIEEALIPTPTGNLKPDLVVVNQGRVHVVDVTVRHEDTGYLDEGHKSKVGKYTPLLEILAEQLKVERGRVLPLVVGTRGCMPEATLDSLREININDRGSYITISLLALRHSIEIYHTFMDYNAPVA

SEQ ID NO: 842 - protein, 1261 aa, synthetic construct
MNSIAHTFGGLGPDHRLNRPRPRGPLFGGTDPDHRRNSGGRSIDEHGLELDTEHRDATDALQLTNRNEIILPVPFDSKSCEACLKQRKGDFILLNLNAAVQHARSHHCGVGVWYACKTCGKTYKTKHAAQCHVPKCSGPATSEGKSVICGLCSQAFKTQRGLSQHERLIHPVERNAKREMAGTGKTGRGLSKGYGKVWQKEEVEIMLRLEKTLKGHPQIAKQMMEHLPGKTSKQIRDKRKEASYKALVEHCVSTPGHSSNPGPLESICSSSDSETEIRPVPTIGHVSETEDETSCDEGQYTRQLSPASPAIGQSSLAQRQLTETTQRPGLLLQAGEGPSPIHNEAASPEHKHTRPQSPIGAGEIPGDEDKAEHEWRNDIIRQAVADTKENSTLSRKCRELRSRMISILTDIGEGGPLATQTLIDDVYAQVLEQIESTQATRASKRSRRKGPKTQAGSKRRRKRYRYARTQDLFRKNPNLLARYVREGTPWLENEDSSSPKPEDVKSFYSCLWGAAPNITIPFSVTGFGRKALELGEVFQAITARDINERLKHTRHNTASGPDGIERKHITGLDLREILRIFFNIILVSKIQPKAWNTNRTILIPKQGKDGSRVENYRPLTIGSLICRTYWGIVDRKLREVVSFSPRQKGFVHETGCFNNVHILNETIKAAKQSKGLVAVQLDVAKAFDTVPHAAIEAALRRLGLPTGVRESIMNSYTSLTTTIEYAESRTEVSLKRGVKQGDPLSPFIFNAIVDPLLEQLEQMKGYVIDESHSLSALAFADDLILLATTKDKAQSLLHHTESYLKNLGMRIAAEKCASFEIRCTKDSWYIANPDLCLSNGDKIPNSAADSSLCYLGGHISPWSGLRYNDLVAQLETTLERCRSAHLKPHQKLSLTTTHLIPHFLHKTVLATPPITTVRAMDQTIRNHVKVVLHLPMSTPNGLLYCSKRDGGLGIPKLETIVTSSALKQGITLLNSLDPAIHALLQESKLEQRLESLAKHARLQWPILNFRVIDSHKKRMKTDELKAWGQLRSKGKGVASFADDRNGNAWLYNPNLLKPSRFLTALRLRGGMTSDKVTMNKVVPQLNVKCRKCRACNETLAHILGQCIYTKAQRIRRHDEIRDYVSKKLASMKEVQIIEEALIPTPTGNLKPDLVVVNQGRVHVVDVTVRHEDTGYLDEGHKSKVEKYTPLLEILAEQLKVDRGRVLPLVVGTRGCMPVATIDSLREININDRGSYITISLLALRSSIEIYHTFMDYNALVA

SEQ ID NO: 843 - protein, 1272 aa, synthetic construct
MDNFDPAIPTDNDMNFDGISPAHRRRLRPHRAFDGNSPVHRRRLRPNRGPLPDDLSEDVDNAYRDATDALLSRATMEIILPLPFTSRSCESCLHQGKGDFILLNLNAALQHARSHHCGVRVLYSCNTCGKTYKGKHAAHCHVPKCRGPPAGQDKTVICGICNEAFKTQRGLSQHERLKHPVERNEKRERAMTDRPSQRPNRGYGKVWQKEELDTMIRLEKLLRGHPNIAMQMKEHFPNKTLKQIRDKRREPTYRALAELYDASQGHSATPELLEVICPSSDSETESRPVHTGLHISETEDEDTSDQGQFSRRLSPSSSRSGQASLAHRHLTEFERLPGLERPADDGLPPRREDADDREQQVNITPSKESGATDDLGSATMTEQEWRTGIIRQTLAEAPDGSTLSSKCRDLHSRLVSILTDISDGQLLATQALVDDVYARVLAQIESSQTTHASKRSRTRGPKTQSGRKRKWKRYRYARTQDLFRKNPNLLARYIREGTPWLEDEDSSSLKQEDIKSFYTSLWGTTRNISVPFSVTGSGRIARNIGEVFQAITARDIKERLTHTRHNTASGPDGIQRKHITGQDIKELLRILYNLILVSKIQPTAWNANRTILIPKQGKDGSRVENYRPLTIGSLICRTYWGIVDRMLRELIHFSPRQKGFVHETGCFNNIHILNETIKAGKNRNGLVAVQLDIAKAFDTLPHKAIEAALERLGLPSVARESIMNSYTNLSTNIEYAGLKTEVPLRRGVKQGDPLSPFVFNAIMDPLLDQLEQMKGFVINESHSLSALAFADDLILLSDTKDKAQRLLNHTESYLNALGMRIAAEKCASFEIRPTKDSWYIINPDLSLTNGDKIPNSAADSSLSYLGGHISPWSGLHYKDLVDQLATTLERCRSARLKPHQKLSLTTSHLIPHFLHKTVMATPPISTIRAMDQTIRNHVKVVLHLPMGTPNGLLYCSKRDGGLGIPKLEALATSSALKQGTTLLNSLDPAIHALLQETKLEQRMQSLAKAMRLQWPILNFRVIDAYKKRMKTEELKAWSQLKVKGRGVQSFTEDRYGNAWLYNPNLLKPSRFLTALRMRGGMTSDKVTMNTVVPQSNVKCRKCRTCNETLAHVLGQCIYTKAQRIRRHDEIRDFVTKKLAAMKEGVKIIEEALIPTPTGNLKPDLVVVNQGRVHVVDVTVRHEDTGYLDEGHRSKVEKYTPLVEILAEQLQVERGRVLPLVVGTRGSLPKTTIDSLREININDRGSFITISLLALRNSIEIYHTFMDYNALVA

SEQ ID NO: 844 - protein, 1272 aa, synthetic construct
MDNFDPAIPTDNDMNFDGISPAHRRRLRPHRAFDGNSPVHRRRLRPNRGPLPDDLSEDVDNAYRDATDALLSRATMEIILPLPFTSRSCESCLHQGKGDFILLNLNAALQHARSHHCGVRVLYSCNTCGKTYKGKHAAHCHVPKCRGPPAGQDKTVICGICNEAFKTQRGLSQHERLKHPVERNEKRERAMTDRPSQRPNRGYGKVWQKEELDTMIRLEKLLRGHPNIAMQMKEHFPNKTLKQIRDKRREPTYRALAELYDASQGHSATPELLEVICPSSDSETESRPVHTGLHISETEDEDTSDQGQFSRRLSPSSSRSGQASLAHRHLTEFERLPGLERPADDGLPPRREDADDREQQVNITPSKESGATDDLGSATMTEQEWRTGIIRQTLAEAPDGSTLSSKCRDLHSRLVSILTDISDGQLLATQALVDDVYARVLAQIESSQTTHASKRSRTRGPKTQSGRKRKWKRYRYARTQDLFRKNPNLLARYIREGTPWLEDEDSSSLKQEDIKSFYTSLWGTTRNISVPFSVTGSGRIARNIGEVFQAITARDIKERLTHTRHNTASGPDGIQRKHITGQDIKELLRILYNLILVSKIQPTAWNANRTILIPKQGKDGSRVENYRPLTIGSLICRTYWGIVDRMLRELIHFSPRQKGFVHETGCFNNIHILNETIKAGKNRNGLVAVQLDIAKAFDTLPHKAIEAALERLGLPSVARESIMNSYTNLSTNIEYAGLKTEVPLRRGVKQGDPLSPFVFNAIMDPLLDQLEQMKGFVINESHSLSALAFADDLILLSDTKDKAQRLLNHTESYLNALGMRIAAEKCASFEIRPTKESWYIINPDLSLTNGDKIPNSAADSSLSYLGGHISPWSGLHYKDLVDQLATTLERCRSARLKPHQKLSLTTSHLIPHFLHKTVMATPPISTIRAMDQTIRNHVKVVLHLPMGTPNGLLYCSKRDGGLGIPKLEALATSSALKQGTTLLNSLDPAIHALLQETKLEQRMQSLAKAMRLQWPILNFRVIDAYKKRMKTEELKAWSQLKVKGRGVQSFTEDRYGNAWLYNPNLLKPSRFLTALRMRGGMTSDKVTMNTVVPQSNVKCRKCRTCNETLAHVLGQCIYTKAQRIRRHDEIRDFVTKKLAAMKEGVKIIEEALIPTPTGNLKPDLVVVNQGRVHVVDVTVRHEDTGYLDEGHRSKVEKYTPLVEILAEQLQVERGRVLPLVVGTRGSLPKTTIDSLREININDRGSFITISLLALRNSIEIYHTFMDYNALVA

SEQ ID NO: 845 - protein, 915 aa, synthetic construct
MDNFDPAIPTDNDMNFDGISPAHRRRLRPHRAFDGNSPVHRRRLRPNRGPLPDDLSEDVDNAYRDATDALLSRATMEIILPLPFTSRSCESCLHQGKGDFILLNLNAALQHARSHHCGVRVLYSCNTCGKTYKGKHAAHCHVPKCRGPPAGQDKTVICGICNEAFKTQRGLSQHERLKHPVERNEKRERAMTDRPSQRPNRGYGKVWQKEELDTMIRLEKLLRGHPNIAMQMKEHFPNKTLKQIRDKRREPTYRALAELYDASQGHSATPELLEVICPSSDSETESRPVHTGLHISETEDEDTSDQGQFSRRLSPSSSRSGQASLAHRHLTEFERLPGLERPADDGLPPRREDADDREQQVNITPSKESGATDDLGSATMTEQEWRTGIIRQTLAEAPNGSTLSSKCRDLHSRLVSILTDISDGQLLATQALVDDVYARVLAQIESSQTTHASKRSRTRGPKTQSGRKRKWKRYRYARTQDLFRKNPNLLARYIREGTPWLEDEDSSSLKQEDIKSFYTSLWGTTRNISVPFSVTGSGRIARNIGEVFQAITARDIKERLTHTRHNTASGPDGIQRKHITGQDIKELLRILYNLILVSKIQPTAWNANRTILIPKQGKDGSRVENYRPLTIGSLICRTYWGIVDRMLRELIHFSPRQKGFVHETGCFNNIHILNETIKAGKNRNGLVAVQLDIAKAFDTLPHKAIEAALERLGLPSVARESIMNSYTNLSTNIEYAGLKTEVPLRRGVKQGDPLSPFVFNAIMDPLLDQLEQMKGFVINESHSLSALAFADDLILLSDTKDKAQRLLNHTESYLNALGMRIAAEKCASFEIRPTKESWYIINPDLCLTNGDKITNSAADSSLSYLGGHISPWSGLHYKDLVDQLATTLERCRSAHLKPHQKLSLTTSHHTADLKE

SEQ ID NO: 846 - protein, 1537 aa, synthetic construct
MTMNNVEDAPQVTSREAPTPREPHSWVASKGEVVSAYPLRNPWRCPVTGCKHVQVNGGGKSIETHAKSHGKSVGWSCSKCGSEKFKSYLAVACHHGKCGGRVTPKEHEFSCESCNRAFATAQGLGQHIRHAHPELNMDLRRARDGGGKTARSWSEEEVTLLLAEFPRASRKGRVAQLASEWGRSENSVRKAYAWYSAEALSPAPTTDANYDAAARGDQSEPEENRGEEVPPPSSCPEQVREESTGRVEQVEPGRRRGRTGKTANSKTGNAAAPLMQALGLVTLRGEPSEVSKRGGKQESVRSPYLLRSADLGSRSEEVSSGGGFQTLDKWLRPTSERRPLRQETPEHGQEPKQCTDPPNQSPRSMTDGGCSAPDGLERGGEQEERRRGGSESSGTFCGSEMASGGNGDGLPKRGTPCNEDVTLGPSNRGQVGSAVPVDQSTVSPSATAPLRENTPEVVHALVESNPPAQLGGTTETPFSGGDVEAPGSPGTGSPGGGKAQDSDTTVRRGNLEDGDVQVAMPPCGQQRTDGPKSGGEDGEPESEPIPPALGVQRSEGREYRKPEKRRPTEFESMRGMVQWIDDIAMKRRAHLKEVWGLVRTALEAVMENPESTDAYTAVDSATAAVQKALEEQSTGAATARSNPSRPRPRQNEQRRVPVQRQRKHAMRESKKRKEKRQAYRTAQVLFEKDRKLLYQRVQTESLLQPMGKSTCPIPPDTIHAEYKEIFGLNENYQEGCLSHFAKPVVDPDNPAKTAKLNNFQLVSPADVLDAWRALKPKAAPGPDGVRLSEIRKLDPGGEAFAILYTVWHVSKHVPVGIKECRTILLPKGGDPGVLKNWRPITIGSWVLRVYSRIVARNLERGTTLHQQQRGFLAGTNGCFENLWLWQKVMKACKSRKGALGCALLDVAKAFDSVAHKHVLEALERLSVPPHWVEVVKDLYTGVTTRFELGSARTEPITFLRGVKQGDPLSSFLFNACMDPLICELEANGRGPEFKGPQSASPVRINCLAFADDMGLFGDSSQGLQGSLDIADRFYGVTGMAVNASKSQCFLLESKGKTWKLEPFQFTIGGESIPSLGLMDTAKYLGLRCGPYGVKRELVDTVRDAILKLGKAPLKGLQRVALLKEQLLPKVLFALTVSMTRRSQLSRLDKEIRAAVKKWVHLPASVTSALLYLKVRHGGMGLMCLEQLVPRMQAAQLRKLAGGKLREQALALGVNEDAARLTSVKTAAESEQYWLAAYTNCLWQGVGAESFSNSPCSNTEVDPCSTRLDHKTYCHLLKMRTSTTPVNALMHRIRGVNKECRNCHSQPETLAHVLGECEFGAKDFRIVRHNRVVQSLKKMADEAGYLTVLEPTVVLANPADTGQLERLRPDLLVIEEGRSMAKRVQIVDVTVRFEGVYDGKSTLEFAAGQKIAKYDRIRPEVARMFETDPRNVEVLPFVLGSRGAVPSASLTFLKQLVGGGNAARAKGIAKGLSRSVIRSSCVILGIHMAKTRSNSRPTKSNEHSRLKHRSPQHRGSAAVESLCQTSEDVGGCPEGAVV

SEQ ID NO: 847 - protein, 1280 aa, synthetic construct
MWLAPTSSRISLAPKSKSNLSSQVNNADDEQESGRGGENRADVTSNQAGSTQCYSLYYPFGANGTCRYCHEMLGTSVANIESHLKSHSIQQYEYLCGTCKKSWPSWRSVMAHYSKSNCRHTTPITAIADEVKDSEVSSSIVVRKTEPKAAKNSGKTTKKQSKIVENPSVDPVIAKKTTTSSSSSIRSVVSKDSEHDDDQLHLATASIITSTRTTTAARVNSEETGRIKTTDEKKMFYCQHCAAEGWDTAASLSQHMRRMHLSEYNATIEVPMLKRRWTADETLVLAELEASIPTSEGVHVNQVLAEKFTSRSFEAIKSHRKRQEYRALVEQLRNRCTASFNLEGSTCTYNTNTSSTVDVNPVVNDSNCFDEDSRRIDPHDTQCSKAPSTTTATVRPVNVDDDDCPNIRQYLREQIIEGKVPVCHTMNRAVMHYVNNVPNADPVNEALRGIQETLASVHPPGEDHGGKPNAGSKLQSQRSKRRAQKFAHYQRLFKSDKSKLASEIFDHVDTSAIKPPLSEAHEHFRKIWETEAKDTDAVEQTETIGTDILLAPITREDIAWAIDQTRNDTAVGPDHVSLDQIRAIAKKELWCAFNIWLGQRKIPDLLKINRTALLPKGNEGLENVKNWRPITIASLLIRLYNKILTRRMQSVFHINRKQTGFKPMNGVGQNTSLLHNLLRHARTKRNSIFVCLLDVSKAFDSVPHDSIKRALRRNGCPTGLIDLISDQYENIYTRISYGKESSQEIFLRRGVKQGDPMSSILFNLVIDELFEIIGDRFGYAIDGVGSVNARAFADDIALISGSEIGMQQLLGSTEQFLLARGLELNVKKCVAICLRKAGKAKKSQIADSSVQNPPHFVVNNEPIRLLGVNDQCKYLGIQYTPLGAVDSRVPVSKLKLALASLSKAPLKPQQKVLMLRSYLIPRFIHTFTHTECYPKLMGQQDRLIRRWLKQTLRLPMSVSNEFFYLPIKEGGLGIGMLYDIIGAAKVRLHAMFGKSGDACLQYLVETQGSAMHARWCQAMKISYRPSTVDLNSRKNLVLEESRERFAKTVHGGGSEVFRASPITNQWLSGQTRLLKGSTYIRSIQMRTNTIPTRVTTSRGQDTIKTCRRCGLADETLIHILQTCPITQGMRCRRHNNVCRKVAEKLRSKGFQVFSEQGIPSPGLQTNISRPDLIAKRGDEALVLDITCVYESGSHSLQDAYRRKVSRYESLAETIKQHYQVQKVTFHGLCIGSRGAYDPRHLSTWHSLGFSGSELMLLAVAVMEDSLRTITLFNNANSLRI

SEQ ID NO: 848 - protein, 1268 aa, synthetic construct
MKSNTKHTSQVNNAGDTQGSAGIRKNSARTSNQVDLTRSYCVYYPLEINSICPDCPQLLGTNMTNIEKHLNSHGVTLLEFRCGVCRKQWPTWRSASLHYSKSSCRLTSTTSLPNITCTQGSLDVMQSQRKSVEKLSTKRSSSTTADDEESEAEESIVKQEKVDKRKSAGSNSTRRKNRSPSVSTKADAKEIDRSAADAKTTVHIGEASDDDGDQSTKESSTATGINVVDPKKTEKGEKYYCKLCAAKGWDTKVGLSQHMRHMHKSEYNASIEVPLKKRRWTQDEMIVLAELELEVTSSQTPCNSITLAKRFPSRTSEAIKLRRQSKEYKELLHQISLKRTAQICEESECTDASSDVDMITTVNGSIVEKDEDEADSRDRSLSTRLGADSTTCPDIRRYIQEKIIRGKVQMCTTMQDALMHYVADVCGSDPVLESLEGIREALTNVQPSQKHRDGKTNAGSKPRSAKAMRKAERYAHHQQLFKKDKTKLASEIFDGVDNSASKPPMSVAYEHYKKIWTVDTKDTGTLKSKASVGNDVLLAPITREEIALAIDNTKSNTAVGPDRLPMKDLKSIAKNELWGAYNIWLGLRRVPDPLKINRTVLLPKGKDSLDNIKNWRPITIASVLIRIYNKILAKRMQSVFHTNSRQTGFKPVNGVGQNVALLHNLLRHARTNKNNLFVSLLDVSKAFDSVPHESIKRALTRNGCPSEFIQIIENQYENSYTALSYTDGDSPLIPLKRGVKQGDPMSPILFNLVIDELFEIIGDRFAYELEGVGKVNARAFADDIALMSGSEVGMQQLLSETEEFLRARGLELNAEKCISIGLRKAGKAKKSQIADSSVKRSPVFTVKDKPLQLLAIDTLCRYLGVQFTPLGAVDSRVPVSALKSALESLKKAPLKPQQKVVLLRAYLIPRFIFAFTHTECYPKLMGQLDRLIRRWLKEILRLPASMCSEFFYLPIKEGGLGVGKLYDIVGIAKIRLHGSFHRANDECLRFLVETQGSAMHSRWCNAMKLSSRPSVTDINVRNVLTLDQSRTRLSETVHGLGSKVFRVSPITNQWLCGQTRVMKGNAYIRAIKMRTNTTPTRVSTSRGRDSIKTCRRCGLADETLSHILQTCPITQGMRCKRHNNVCRKVADKLRSKGFQVFSEQGIPSPGLRTNVSRPDIVAVRGDQALVLDVTCVFESDLGCLQKAYHQKVDRYKPLAETIKQIHKVRVVTFHGLCIGSRGAYDPGHLAIWHTIGFTGVELGMLAIGVIEDSLRTIALFNNANRLGV

SEQ ID NO: 849 - protein, 1276 aa, synthetic construct
MQLYTSLAVKSTTNHTHQVNNAGCTQESTGIRKNSAKISNQQDLTRSYCVYYPLGTNSICPECPNLLGQSLTNIEKHLNSHGISHLEFGCGICRRQWPSWRSVSMHYSRSNCRLTSTTSTPHITGTQGSPNVSHSQVKSVEKLSSRRSSSTTADDEESEAKEPIVRKKMVEIGSTEENSTGRKEKCTPSVNPRGDASNHIDRSIADASQHAHIGDISEDDGNPNDRERSTATGNIDVDPKKTGERHYCKLCASHGWGNKAGLSQHMRQKHKSEYNASITVPMIKRRWTLDEMVVLAELEATLTSSQGSCSSKDLAEQFPSRTQESIKLRRQLEQYQEVLRQVRLNRATQKGEESNCLGASSSNVHMVTVANDSINNEEDDDSDSRDRSPGTQLGTDSTACPSIQRYVQENIIRGKVKMCTTMQDALMHYVADVCGSDPVSESLEGIREALSSVQPSQKHRDGKTNVGSKPRSAKVMRKAERFAHYQQLFKKDKTKLASEIFDGVDNSAAKPPMSVAYEHYKKIWTVVTKDTGTLRSQASVGKDVLLAPITREEIALAIDHTKSNTAVGPDRLPLMDLKRIAKNELWGAYNIWMGLRRVPDPLKINRTVLLPKGKDNLDNIKNWRPITIASVLIRIYNKILARRMQSVFHTSSKQTGFKPVNGVGQNVALLHNLIRHARTNKRNMFVSLLDVSKAFDSVPHESIKRALTRNGCPSEFIQIIENQYENSYTALSYTDGDSPLIPLNRGVKQGDPMSSILFNLVIDELFEVIGDRFAYELEGVGKVNARAFADDIALVSGTEVGMQQLLSTTEEFLHARGLELNAEKCISIGLRKAGKAKKSQIVDSSVENPPVFTVKDKPLQLLAIDTLCRYLGVQFTPLGAVDPRVPVSALKAALESLKKAPLKPQQKVVMLRAYLIPRFIFAFTHTECYPKLMGQQDRLIRRWLKEILRLPASVCSEFFYLPLKEGGLGIGQFYDIVGIAKVRLHGTFHRANDECLRFLVETQGSAMHSRWCNAMKLSSRPSAVDLQTRNVLTLDQSRARLSETVHGIGSKVFRVSPITNQWLSGQTRIMKGNTYIRAIMMRTNTTPTRVSTSRGRDSIKTCRRCGLADETLSHILQTCPLTQGMRCKRHNNVCRKVADKLRSKGYQVYSEQGMPSPGLQTNISRPDLIAVRGDRALVLDVTCVFESELGCLQRAYHQKVDRYKPLAGTIKQKYSVQDVDFHGLCIGSRGAYDPGHLAVWHTIGFTGVELGTLAVGVIEDSLRTIALFNNANRLGI

SEQ ID NO: 850 - protein, 1173 aa, synthetic construct
MCVYYPLELNSVCSRCDESLGCEVANIEEHLKSHDIFKYEIKCGVCDKSWPSWRSVTAHYNRSKCRNTTPTISHATTTATTTTTVKEKASDREIDEEETGKRMTTTESLKVTTQEEKEEKKDEGLFYCKLCAAGGWNKQVSLSQHMRHMHAKEYNAAIEVPNIKRRWTKDEVQLLAELEASVPSDDGTSINQILSQRFPSRTFEAIKSQRKKSDYRDLVKRIRERGIIEESTCTDNSSMKIKSSSNFNLNNNPNPIVNDGNCFDIDEVDSNDCHQLNSLPTGSNDVEQYPDIRLYVRTNIMDGRVQLCDKMRLAMIDFVNIDSQNSDAVNMSLEGIHEALKMKKKKASNEDSHEDEKKKKNSLSGKLKNNKTKKKMQKYAHYQQLFKKNKSKLASEIFDSVDTSASKPPISDAYDHFRKVWEIKASDTATVDEIEPRGTNILLAPITREEIACVIEQTKNDTAVGPDELTLESLRCIARRELWCAYNIWIGLRHIPEQLKLNRTALLPKGNEGLEQIKNWRPITIASLLIRLYNKILAKRMQKVFQISHKQTGFKPLNGVGQNTALLHNILKHARANKNNLFVCLLDVSKAFDSVPHDSIKRALKRNGCPKEMIELVGEQYENITTTITYGKECSPAIELKRGVKQGDPMSSILFNLVIDELFEIVGDRFGYEISGVGSVNARAFADDLALISGTEIGMQELLSQTEKFLSCRGLELNVKKCVAICLRKAGKAKKSQIADSSVKNPPSFTVNNEPIRLLGVKEQCKYLGIQYTPLGAVDPRESVSKLRLALTSLLKAPLKPQQKVVMLRTYLIPRFIHTFTYTECYPKLLSQQDRLIRRQLKSILKLPASLSSDFFYLPFKEGGLGIGKLYDIVGFAKIRLYNMFARSGDMCLKYLTETQGSSMHARWCQAMGLSHRPPMTEVNQRKIVVRDEGRDRFIQTVHGSGHEVFKSSPITNQWLSGQTKIMRGSTYIRCIQMRTNTIATRVSTTRGRNSIKTCRRCGLADETLIHILQTCPITQGTRCQRHNNVCRKVAEKLRSKGFQVFSEQGIPSPGLETNISRPDLIAIRGDHGLVLDVTCVFETGKHSLTEAYRRKVTRYESLAETIKVKYRITTVEFHGLCIGSRGAIEPRHLSIWHSIGFSTTELGVLAVSVMEDSLRTITLFNNANKLRL

SEQ ID NO: 851 - protein, 1249 aa, synthetic construct
MHYSLATKRKHIFPSQVNNADDEQESGRGGGNRAELTSNQQVSSESYCLYYPFEANGTCRYCPEMLGTNATNIEKHLMSHGIQQYEYQCGVCKKSWPSWRSVITHYSKSNCRHNTSITSSTQVTDTEVSSNIVVRKTETTTTTKTKATGRKRKKSEIVDNPSSGAEVAENPAKNSDVSKDTENDDDHLHTASNIDTTSSAVVNSEETGRIKTTDEKKLFYCNHCAAGGWDTSAGLSQHMRHRHMSEYNATIEVPMIKRRWTKDEALVLAELEASIPSSDGTFVNQVLAERFPSRTYEAIKSHRKNQQYKDLVHQIRNRYAATCNLEGSNCTNMSSVVNIDPVVNDSNCLIEDSQTDPHDSTQIAQTMINVDICPNIRQYIRQHIINGKVQLCDTMNQAMLHYVNDVPDADPVNEALQGIQETLAGVHPSGGDQGGKQNAGSKLKSPTAKRKAQKFAHYQRLFKSDKSKLASEIFDSVDTSATKPPLSDAHEHFRKIWETKAKDNGTVQETRTIGTDILLAPITREEIALAIDQTKKDTAVGPDHVSLEHVRGIARRELWCAFNIWLGLRKIPDLLKINRTALLPKGNEGLENIKNWRPITIASLLIRLYNKILTRRMQSVFHISRKQTGFKPINGVGQNTSLLHNLLRHARTKKNNLFVCLLDVSKAFDSVPHGSIKRALKRNGCPTELIDLISDQYENIYTRITYGKESSPEIVINRGVKQGDPMSSILFNLVIDELFEIIGDRFGYEIEGVGSVNARAFADDIALISGSEIGMQQLLLTTEEFLSARGLEINVKKCVGICLRKAGKAKKSQIADSSVHNPPVFMVNNEPIRLLGVNEQCRYLGIHYTPLGAVDPRVSVSKLKLALESLSKAPLKPQQKVLMLRTYLIPRFIHTFTYTECYPKLMGQQDRLIRRWLKHTLRLPPSVSSDFFYLPIKEGGLGIGKLYDIIGAAKVRLHAMFSKSGDTCLQFLVETQGSAMHARWCQAMKLSYRPSAADIASRKNLVIDECRERFSNTVHGGGSEVFRASPMTNQWLTGYTRLLKGNTYIRSIQMRTNTIPTRVSTSRGRDSIKTCRRCGLADETLIHILQTCPITHGMRCQRHNNVCRKVAEKLRSKGFQVFSEQGIPSPGLQTNISRPDLIAKRDDEILVLDVTCVYETSKHSLQDAYRRKVDRYKPLAETIKQLYQVQNVAFHGLCIGSRGAYDPKHLSTWHSLGFSGRELGLLAVGVMEDSLRTITLFNNANGLRI

SEQ ID NO: 852 - protein, 1219 aa, synthetic construct
MKSKKNSQSQVNNADDEQESGNAGKDRAGVRSKQLDCSQSYCLYYPFEMNSTCQICNDFLGTTSSNIEKHLKSHGIDKYDYKCGACNKSWPSWRSAMTHYSKSNCRLRGTSTTTSKDTHTTTTSAAATAKTTTTMVHTSSQQVTVEVLSQDGEPKADDETSSNVSSQAKEEPKLLYCRLCASGGWTKSVSLSQHMRRMHPTEYNASIEVPTVKRRWTDDETQILAQLEASIPPSDGLFMNQMLASKFPSRTFEAIKSHRKKEDYRALVEQFRTQMSVVSENERSNCIYNDNNEDQLSHVNTNPNPNPNPNTNNNGFDGDDDLPVVQTIATAATTTTTINVEEYPDIRRYLKTHVIDGKVQLCNTMKEALIEYVNNIPHTDPVNKSHSGICEMIKDVPRNPKDPSVKTNDKGRRKGEKSKKKAQQYAHCQRLFRTDKSKLASELFDNVDTTAKKPPLSDAYEHFRQIWETDAFDKGAVEQGNDIGTDILLAPITREDIQLAISQTKSDTAVGPDRISLDQIRSTSKNELWCAFNIWLGSRRIPSTLKINRTALLPKTNEGLENIKNWRPITIASLLIRLYNKILARRMQLVFRTSQKQTGFKPMNGVGQNTSLLHNLLRHARTNKNNLYACLLDVSKAFDSIPHDSIKRALIRNGCPPDFVNLVSDQYNQTYTRITYGSENSKEILLKRGVKQGDPMSSILFNIVIDELFQIIGERFGYEIEGVGSVNARAFADDIALISGTEIGMKELLTITETFLSNRGLEINVKKCVAICLRKAGKMKKSQVADSTVKNPPILTVNNEPIRLLGINEQCKYLGIHYTPLGAVDPKTAVIKLRSSLASLSKAPLKPQQKVLMLRIYLIPRFIHSFTYTECYPKLMGQQDRLVRRWLKQILKLPASISTDFFYLPIKEGGLGIAKFHDVIGTAKLRLHGMLTNSGDVCLRYLVETQSSAMHARWCQTMGLPYRPSSIEVNSRQKILLDESRSRYAQTVHGGGYDVFRVSPITNRWLSGYTKIMRGSTYIRCIQMRTNTIPTRVTTTRGQQTLKTCRRCGLADETLIHILQTCPITQGMRCTRHNNVCRMVADKLCSKGYNVHAEQGIPSPGLQTNISRPDLIAIKNDEALVLDVTCVYETSKSSLHDAYRRKIDRYAPLSDTIKQKFKVNHVSFYGLCVGSRGAYDPKHLSIWHSLGFSGNELMVIALRVMENSLRTIKLFNNANRLCI

SEQ ID NO: 853 - protein, 1247 aa, synthetic construct
MENRKNSAVTSKQQNQMKSYCLYYPLDANSTCQDCNDLLGVSVANIEKHLNSHNIKKFEYRCGVCDKLWPSWRSVTTHYSKSSCRNQTSTAPSSSTNTMQKFSNSIIDRKESEVTKANSKESGIVTVVDEESETDDEDSSVLQQQTNENIQKHRYSSSVIPKNNRKESDSESNLEEDDGDDENETSESIGTQHSAIGVGLKKTGKIKKTIDKINNKYYCELCAAGGWDKSVSLSQHMRHMHKSEYNASIEVPMKKRRWARDEILILAELEAKIPSTDGIFINQILAKKFPSRTLESIKSRRKTKEYRDLLQQLRDCQAATSPEGLECIYESSIVDSSTVENDSINDKEEEDNENNPDNTIISVLGTDSTTYPNVQQFIKDKIIDGRVPMCTTMADALAHYVNHTMNSDPVEESLKGIREALGNVHSSQPHRDEKRDAGSKFRSVKSKKKAHEFAHYQRLFKKDKSKLASEIFDGVDNSAIKPPMSVAYEHFRKIWEADTKDTGKLENKVSVGADVLLAPITREEIAWAIDNTKNDTAVGPDHVPLKDIRRIARNELWCAYNIWIGSRRVPNELKANRTVLLPKGKDDLGNIKNWRPITIASILLRLYNKILACRMQSVFRTSSKQTGFKPVNGVGQNVAILHNLLRHARANKNNLFVCLLDVSKAFDSVPHESIIRALARNGCPNEFIDLIKNEYENSYTALSCTDGDSPLVYIKRGVKQGDPMSSILFNLVIDELFEIIGDRFGYELQGVGKVNARAFADDIALISGSEQGMQQLLLETEKFLNARGLELNVDKCIGIGLRKAGKVKKSQVADLSVKNPPSFMVKNKPIRLLGINEQCRYLGVQFTPFGAVDPRAPVAKLKLALESLKKAPLKPQQKVLMLRSYLIPRFIFSFTHTECYPKLIGQQDRLIRRWLKEILRLPSSICSEFFYLPIKEGGLGVGKLYDTIGLAKVRLHGSFTRSGDQCLQFLMETQGSSMHSRWCNAMKLSTRPSAIEINQSKVLFIDESRVRLSETVHGSGSELFRNSPITNQWLSGDTRIIKGRTFIKAIQMRTNTIPTLVSTTRGRDTNKTCRRCSLADETLVHILQTCPITQGMRCQRHNNVCRKVSEKLRSKGFQVFQEQGIPSPQLQTNVSRPDLIAIRGDQALVLDVTCVFESNKNSLQDAYRRKVDRYKPLAETIKEKYKVRDVEFHGLCIGSRGAYDPRHLAIWHSIGFSGAELALLAVGVIEDSLRTITLFNNANSLRI

SEQ ID NO: 854 - protein, 946 aa, synthetic construct
MCMDKNWKTRMKGMKLPKNVTPGIKVPWKKSKCALCEQVLSTAKEAMIHLKMVHKAHKILYVCKSCAGAKKSLGQTISHASKCRKPKIGKAQKQKPHNCPICDRGFGSSSGLAIHKLRIHAARMQMDMSNIHGNNRPDYLTDPSSLLELISCPDKIPSNCETPSLGLKALDNFGSVPRVVKRRRDLRSDVCSHPNRGVAAEARNTPTVRPPPRGSKVSPDPSYLGRREDSLALHDSTSLMSGVSGAGDTLTDGLGNTGVKEGAPLGMRSWRDSRTRGSSSHLCGGVPSGRDTPAGFSFPKGLKALPMVPNDGAPSGRSGWRDSRVLPRSHPKREVTGSARDTPTRRSVLEGLKTTLVPSMGCVRKLQIQHDSMPPRGSVSGVGNPRTLVPEGVKPNVVPTSRKRRRDLRAGKNPGHSHGRASDSRNTPTATLVNKGLNAPSMTLSLLRKEDHTKTVSVLPVSNFNEELLFLYKNEDPRGRDLVSEKGKFKKSLRFYTVPGVETRSAKNIKKLLKNLATFKGRNAGRAAVKPKGIWNPPTSLHTRAKYRLAQMYYESSLKELAIGILDDKTKILCPISAKDISTEYKRIWESSDEFKSLGSFSKRPKAVNKLLRGPITPGEVLFTVKAFKPNTAPGPDKLGKNDLLSWDPKARIFNEFLIRGKIPGSLKVSRTVLLPKGSGSFEKNEIKNWRPISIGSVVLKTFMAIISKRLQCACDLHPRQRGFIQSPGCAENLTVLKELMERAKKNKNTLAVVFIDFAKAFDSVSHKHIDEVLKQRNVNMALRKIIKDSYNHCYTKVETSEGATAKIEIKKGAKQGDPLSPLPFCLALDPLVATLDELGDGAEWDNCTGAKVSVMAYADDIILLSDSIKGIKKNMEILSIFSDLTGLRVNPTKCKGLLIVKGFPRIVKEGWTINGEEIEMLGPTGRTKYLGVHVNPWAGLMKPPT

SEQ ID NO: 855 - protein, 1340 aa, synthetic construct
MKGKKLPNIVSVGIKVPWTRSNCLLCKLDLSTAKEAAIHFKKVHKAKWVLYICKSCAGTKKSLGQTIAHASKCVKPKSKKDIKQKEHSCPICERKFGSAGGLTIHKLRIHASGPEIKTGSVNQTNYLDRIINPYAWSDAEPISNAASAGTDTPILGIKAVPRFGSAPRVEGRRRDSRANIRPHSIRRAAMEARDTPTASPPIRGLKVMLDPPHLGRREDSLTLHDSTPIVGGVSGVGDTLTDGPVGINGNSVTPSGDRCLSLSQVCGDPPQLLGGASGAGDDLDGPYSSAGLKALLSVSVGRAPLEPRRWRDSRALLRSHPIRGVAGGSRDTPVPPPVTRGLKTTMAPSSGYVGKPQTHPDSKFPSSCVSGAVVSHVLSLGDKESLVVPSMRIRGRAPRSQSRPNRHRGRVPGACGVPAGALLSEGSNALPAMSSSGSGGGNGRTVSAPPVSEMNGELSFLYNNVAPNNRGVISEKGMFRKSRRFYITPGVEPRSVMCTRTLLKHLATFKKRNAGGAAVKPKGIWNPPLSIRDRAKYRLTQMYFEQSLNELAIGILDDKSRILCPISPSNIHIEYRKIWESIDEFRGLGSFAKRPRAINKLIRGPITPGEVLTTIKSFKPNTAPGPDKLGKNHLLSWDPKGKKLARIFNEFLVRGKIPESLKLSRTVLLPKGSGSFDQHDSKNWRPISIGSVVLKTLMSILSKRIQGACELHPRQRGFIQSPGCAENLTVLKEIIDRAKRNRDTLAVVFIDFAKAFDSVSHKHIDEVLKRRRVDMVIRKIIKNSYKHCYTRIETSGRTTAKIAIKKGVKQGDPLSPILFCLAIDPLVATLDEMGEGVQWNSSTGEKVSVLAYADDIVLLSDSIKGINKNMEILSIFSNLTGLRVNPKKCKGLLILKGFPCITKDEWKINGEKIEMLGHTGRAKYLGVQVNPKAGLVKPPIREQLNLMLEKISKAPLKPTQRLGILKQHVIPRVIFEADHCMISKTILEDCDRDIRTRVKTWFHLCHSVSNGLLYCRAKDGGLSIPRLKTAVPATQSKRLIGLMKSDDPLIKEMAGSETNRRKVANMIKELTKNPDDPKPENLESFDTVNIDTNHRKDREFETWCKQNHHGRGVAPFKGDKVSNCWCNNPVEERFSQKEFILALKLRSNSIPVRARVGNSFNGDKSCRWCRHGPETMEHALGSCKTWRDVRMKRHNRICCALASLLLRHGWRVDSEKKITLQENGHYGKPDIIATRGSKALVIDVAVPLKGDVLTLRTTAKHKEEKYKIFENAIKGTYTEVKEVTYWGYPISAKGKWYKGNNILLREIGIKSLRSVNSVARCHVKLALWGTINLCKCFFRN

SEQ ID NO: 856 - protein, 1474 aa, synthetic construct
MGGIYLFQNKLSRTTFVSHTNERFMGLAGTEVTLVYIRYPCLIQVFCCCINRMNSIDKISWSSPRSSLRWSSKLLLRGRLFSGNRDKEKATKTDNSVISTPQRSQRTAIPRKDLFLVKPPIESLFLCINKNWKKLMKGKKLPNIVSVGIRVPWTRSNCLLCKLDLSTAKEAEIHFKKVHKAKWILYICKSCAGTKKSLGQTIAHASKCVKPKTRKDTKQKEYSCPICERKFGSAGGLTIHKLRIHASGPENKTGSINQANYLDRIIDPYAWSDAEPISNTASVGTDTPTLGIKAVHRFGSAPRVEGRRRDSRANIRPHPIRGAAMEARDTPTASPPLRGLKVMLDPPHLGRREDSLTLHDSTPIVGGVSGVGDTLTDGLVGINGNSVTPSGDRCLSLSQVCGDPPQLLGRASGAGDDLDGPYSPAGSKALLSISVGRAPLEPRGWRDSRALLRSHPIQGVARGSRDTPVPPPVTKGLKSTLAPSSGYVGKPQNQPDLELTSSCTSGVVVSHVLSLGDKESFVVPSRGIRRKAPRSQSKPNRHHGRVPGACDVPANALSEGLNALPAKSSSGSGGGNGRTVSAPPVSNMNEELSFLYNDVSPNNRGVVSEKGMFKKSRRFYITPGVEPRSAKCTRTLLKHLTTFAKRNAGGAAVKPKGIWNPPLSIRDRAKYRLTQMYFEQSLNELAIGILDDKSRVLCPISPSDIHIEYKKIWESTDEFKSLGSFAKRPRAINKLIRGPITPGEVLTTIKSFKPNTALGPDKLGKNHLLSWDPKGNKLARIFNEFLVRGKIPESLKISRTVLLPKGSGSFDQHDSKNWRPISIGSVVLKTLMSILSKRIQGACELHPRQRGFIQSPGCAENLTVLKEIIDRAKRNRDTLAVVFIDFAKAFDSVSHKHIDEVLKRRRVDMVIRKIIKNSYKHCYTRIETSGKITAKIAIKKGVKQGDPLSPLLFCLAIDPLVATLDELGEGVQWNSSTGEKVSVLAYADDIVLLSDSIKGINKNMEILSIFSNLTGLKVNPKKCKGLLIIKGFPCVSKDEWKINGERIEMLGHTGRAKYLGVQVNPKVGLIKPPIREQLNSMLDKISKAPLKPTQRLGILKQHVIPRVIFEADHCMISKTILEDCDRDIRTRVKTWFHLCHSVSNGLLYCRAKDGGLSIPRLKTAVPATQSKRLIGLMKSDDPLIKEMAGSEINRKKVANMIKELTRNPDCPKPENVESFDTVNIDTNHRKDREFETWCKQNHHGRGVAPFKGDKVSNCWCNNPVEEGFSQKEFILALKLRSNSIPVRARVGNSFNGDKSCRWCRHGPETMEHALGSCKTWRNVRMKRHNRICCALASLLLRHGWRVDSEKRITLQESGHYGKPDIIATRGSKALVIDVAVPLKGDVLTLRTTAKHKEEKYKIFENAIKGTYTEVKEVTYWGYPISAKGKWYKGNNVLLREIGIKSLRSVNSVARCHVKLTLWGTINLCKCFFRN

SEQ ID NO: 857 - protein, 1365 aa, synthetic construct
MFSRIIVGNCFKDKPAKFETTTKTTPQRSQRTVVPRKDLFSVNPKNECLFLCIYKKWEDKMKGKKLPGYVTVGIKIPWVVSECILCKVSLASAKAAAVHFKKVHKARKLIYICKNCSVTKENLGQTISHAPKCKMPKKRAPGPGPCVCSICERSFGSVRGLSLHKLRAHITRRKPSAIDEKSKLTPILGIAPLVGGTRRDLRVVVRSHPYGGVTSGARNTPTMSLSAGGLKVIPGPSLLGRREDSPSLHDSTLVISGVSGGGDTLTDGSRGTQAPGMAPSRERRRRDLRVHRSWIHRCGETLGTRNTPAESFSPDGKKALSLVLSGGVPRMVTDREDSRVIVCPYPHGGVAVVARDTPPFGITVQGPKVTLDFPPEPVEKWTQHDSTPNQSGVSGAHDFTTEVLGGVNKSCVAPSGGTNYRDSRSYEHPQHVYGGGRGDRDTPMVAPPLEGLKATPATLPLDQYGDSSTRTDNALPIPGVQNNLLFLYDEKVPHSGEKKQLAKWRESLRFYTTDNVEPKSSNCVRVLLQKLQAFKERRKRGAVRKPKGIWNPSPSISARAKYRLTQMYFEYSLKELAIGILDNAERMLCPIPIKVIWKEYKKIWEAQDMFKTLGNFATRPEAKNLLLRGPITPEEVIGTVKAFKPNTSPGPDKLGKVDLLAWDPRGMKLTHVFNYFLTCGKIPKSLKLSRTVLLPKGSELFNKSEIKNWRPISIGSVVLKTFMAILSKRLQDACELHPRQRGFIQSPGCAENLTILKELIERAKRNRNTLAVVFIDFAKAFDSVSHKHIDEVLKQRRVDAVIRRVIMDSYKHCYTTVEAAEGSTEKVQIKKGVKQGDPLSPLLFCLALDPLIATMEELGEGYTWDENLGHKVAVMAYADDIVLLSDSVKGITKNLAILSIFSDITGLRVNPAKCKGFLIKKGYPCIVNEKWKISGDEMEMLGPTGKVKYLGVQVNPWTGFVKPPIRESLKEMLEKISKAPLKPTQRLDILKTHVIPRILYNADHCMVSKTVLDDCDRDIRTQVKAWFHLSPAVSNGLLYSRAKDGGLGVARLAALVPATQSKRLIGLMKADDLLIKKMAGSDTNRKKVTNMLRRLTCNSEYPSNGDLETFDLKKVGPDKRKDSEFQAWCRQRHHARDVVNFKGDNISNCWCSNPVKEGFSQKEFILALKLRSNSIPVRARVSDSSAGDKTCRWCCMGPETLEHILGGCKVWKKTRMKRHNRICNALVVLLSRHGWRVDTERKITIQENGKIGRPDIIAVKDKRALVLDVAIPLKGDDETLESMAGKKVEKYEVFDKVIKDMYKDITDVTYWGYPISAKGKWFKKNAALLRAVGVKSTRTIKCIARCHVKLALWGTINLCKGFFRK

SEQ ID NO: 858 - protein, 1034 aa, synthetic construct
MVFFSIEKDWRSRVNTGALPPDVSVGLKVPWPTQDCSLCPVTIPTAGTAMKHMKIRHRASKVSFICARCSGISPSFRQVVTHAPKCGLHKQYKSATINLFRCEHCTKSFTTKRGLSLHRRRAHLAVYLSSIDSQPAVSTPPGMPNLEDLQLLGNMLPPVEACSGAAVALMKAFGEEKFLPFSPWKMTPRQINIMTGRVVATLKRRNPRLAGGVAAFKLKRLSYPVSSSSRYRLTQIRMESAISGLAKSILDVAPRVPCPVSPEEVLIEYKGIWGASDSFKGLGQFGDCPQADNSVFHTPFLPDEVLTIINRMRPETASGPDGLGKNDLLRWDPRGTKLVKLMNTILFSGSVPNILKRSWTALIPKGGPSFNPTNLKCWRPITIGSVLLKIFSGALTRRLEAACPLHPRQRGFIKAPGCAENLLVMRGLMSASKRHALTLAVIFIDLTKAFDSVSHSHIAAVLERREVDILIRRLIADLYRGCFSTIRTGGGFTPWIRLRAGVKQGDPMSPLLFNLALDPLIRKLESLGTGFSLPGGQSLTSMAYADDLVLLSDSWGGMERNIRILETFLDLTSLKVNHKKCNGFIMEKGRPRFDDKAWKISGLPINMMGPAGAATYLGVEVNPWRGFLKPDINGVISKMLQRISGSAVKPTQKLRILRGFALPRVLYVADHCLVSKSVLMECDRLVRTAVRAWLHLHPTVANGLLYCSNNDGGLGLQRLSTLVPSIQIRRQIRMLRSDDEITQAVAMISINKKMLVQSIEALLGEPDSLNPVSLDEFDLKLISSKALKALEHEKWCHHLSHGRYARHFRNDKISNCWIRDPVKSGFTQADFIVSLKLRSHSLLHGGPLAQGTQAPPCGMCNSEFNTLGHILSCCPAWRPQRMQRHNNVCTALIFALLWKGWSVDREQRICLIRTKEQWVPDIIAKKGDCALIIDVAIPLSGSLESLKQAANEKVLKYKKLERLVKGSYKVETVSTWGFTIGALGKWYPRNKELLKKCGIISAKTIKGIARRCVKLALWGSINICKVAFREANMC

SEQ ID NO: 859 - protein, 1095 aa, synthetic construct
MAGLIRLGTIKNLKSRLLITPNFDTPSHPKKQGDPATPLRGRMRRIPRRRLFSKRTDPGMLFFCVNKKWRSNFKNKMLPSEVMVGLRIPWMNQKCKLCPARISSLREAMRHMRMCHKAKKLIFLCFTCAGYRCSMRQSIAHASKCKKSYETITSPKGNFNCSHCSKTFKSQRGLSQHRRRMHLSTYLNSPTRDQEAHTPMSGDSGVIINALSGTTIPQMDVVSGLKTSLMMAMKKDEFKHVAPKRMSYGSLSKKVSRMIISIQELNGIIPRGATTKNPFNRGTSSGRAKAKFRRTQNHFASSMKDLASEILDGAIRLPCGIPKDTIWRAYKDIWETPDKFVGLGAFGSCPKADNSQFELPILPEDVLMILKAMKPKSAPGPDGIGKLDILRWDPTGIKLAKLFNTMLLKGKIPSSLKKSRTVLIPKGGPSFDESLLIHWRPITLSSVILKTFSGLITKRLSEACKLHPRQRGFIQTPGCAENISTLNGLILKAKKDKRSLAVVFIDFAKAFDSVSHTHIDSVLRQRGVDRLIRGLVKNSYKRCYSAVQTSEGLTPEIALNRGVKQGDPMSPILFDLALDPLISSLELHGMGISITSDVSITTMAYADDLVLLSDSHGGMSYNISILEKFSRDTGLEINPSKCMGFMIKNGRAILNFDKWKIFGHDVENASPTRHAKYLGVQFNPWKGIVKPQIKSQVKEMLRKISEAPLKPTQKLDILRSYAIPRIVYVADHSMIPKSSLDECDREIRTCVRSWFHLHPSVVNGLLYCAYEDGGLGIQRLGTTIPAIQARRQIKLLSSEDPVTRSVTEATVNMDSISKSIRRLCGVVCAPSLRSLRMFDLEKISAKAMKTFEFQHWCKAGIHGKEAGPLRKDKISNCWLRSPISEGFTQSDFILSLKIRSNSIPVKASVMTGKTPNTICRGCLSHPETLDHVLNVCKTWKLKRMKRHNRICNLLSSVLRSLGWKVDQERRIYLDDGRQGVPDLVAVKNNTAVIIDVTVPLNNDDKTLSKCDRAKICKYSPFTIAIERKYPEVTSVTVWGFPVSAKGKWYTPNAKLLTHIGIKSKQRMKSIARCCVKLALWGSVNICKEFLKIKNM

SEQ ID NO: 860 - protein, 1260 aa, synthetic construct
MEKSNLYFYTGLALDRVNNAPAVGFDAPADSVKYIRGVIRVAGPMDKMVWTIMKSHENESENQVLPVEHGEEVEENVCDDHGEEILSILPMVFTRDTFNDLTMDSFNPDFKYLSTFDDPYVRESGYLNAHLVNGSSLLNSFRPSTDFNRDRNKDLNSTGSNINILESSSWKDGFFYLEYPVDSFNCPICPQILPTFGKWAKHINVVHKSKAIRVVCSKCGKSSQYHNIACHYPKCIPKKVDTPMKSHTCSVCGLGFHTRSGLSQHCRHRHPAVRNEQRKEDMAAKSKIKEGSTRSRIWTKDEVAQLIQLERKYIGKRNINKCIESEMRTKTNKQISDKRRELAKKKLVVTGDREEVTEVEDIRVNILEIPPPRERIFPLKGHPEVDLVEKICKRGKQSREGREIINSLGEIEGLLKEDLTKALGWAMLEKLCYSLVEGKDPRNESQIELRNKGKGKMRKEGRRKQFNAIRRYATKKAKYKFYQQLFDKDRRRLTRIIMGEPDKAKCAIPMKEIEEYYVNILGTIGHGNMIGWPSTTENADNDILMSPISVDEIRIALREIRKDSAPGPDKVKVSNLWDIFNLDSLILTKIFNIWFLNRQVPDEFKKNRTILIPKTQDEEEMKKLTSWRPLTIGSVWIRIYTKILAKRLVETVKICSRQKGFISAPGCEENIAILDNLIKGAKRNGNEIAIVFVDLAKAFDSVGHGHIIAGLRRFGIDEHFIDIIRDLYDNCTTRVWVGDEATESILIRRGVKQGDPLSPILFNIAMDPLLTRLEVEGSGFYVKGNSVTSLAFADDVAILSSSYKGMIKNLGILEEFCKNTNLSVNVKKTKGFHILTKHKTYVINPKDNWQIESEEIEYVQPGDFEKYLGARIDPWIGVGGPVLKEKLKDWSENLIKAPLKPAQKILILQTYILPKLFYNLLLIEPPFNLLDDLDVLVRKIVKEILHLPQCTTDGIFYSRGRDGGLALTKFSVQIPNMLIRKWRRHIVSRDDWMDLSYLYAGENLVDKILSFSAVTSHPKKWREEEFLRWSELRCQGIGIKYFKNDLISNSIFRNSSKVKSSAYIAALQLRANIYPTRETLARGRGGVNALCRWCGKVRETVPHISGQCYKTKNARIKRHNRVVSAVVDKVGKLGWKAMIEPHLRNSKGELRKPDIIFIKGDTAVVVDVTVRWEDNAGSLEQAHSEKVAYYLELEEEIKNLTGGKNIHFFGFVLGARGKWSEGNNDLLQLLGMDRSKNFKESICRLVLYSTIGMMAIFSDR

SEQ ID NO: 861 - protein, 1260 aa, synthetic construct
MEKSNLYFYTGLALDRVNNAPAVGFDAPADSVKYIRGVIRVAGPMDKMVWTIMKSHEHESENQVLPVEHGEEVEENVCDDHGEEILSILPMVFTRDTFNDLTMDSFNPDFKYLSTFDDPYVRESGYLNAHLVNGSSLLNSFRPSTDFNRDRNKDLNSTGSNINILESSSWKDGVFYLEYPVDSFNCPICPQILPTFGKWAKHINVVHKSKAIRVVCSKCGKSSQYHNIACHYPKCIPKKADTPMKSHTCSVCGLGFHTRSGLSQHCRHRHPAVRYEQRKEDMAAKSKIKEGSTRSRIWTKDEVAQLIQLERKYIGKRNINKCIESEMRTKTNKQISDKRRELAKKKLVVTGDREEVTEVEDIRVNILEIPPPRERIFPLKGYPEVDLVEKICKRGKQSREGREIINSLGEIEGLLKEDLTKALGWAMLEKLCYSLVEGKDPRNESQIELRNKGKGKMRKEGRRKQFNAIRRYATKKAKYKFYQQLFDKDRRRLTRIIMGEPDKAKCAIPMKEIEEYYVNILGTIGHGNMIGWPSSTENVDNDILMSPISVDQIRIALREIRKDSAPGPDKVKVSNLWDIFNLDSLILTKIFNIWFLNRQVPDEFKKNRTILIPKTQDEEEMKKLTSWRPLTIGSVWIRIYTKILAKRLVETVKICSRQKGFISAPGCEENIAILDNLIKGAKRNGNEIAIVFVDLAKAFDSVGHGHIIAGLRRFGIDEHFIDIIRDLYDNCTTRVWVGDEATESILIRRGVKQGDLLSPILFNIAMDPLLTRLEVEGSGFYVKGNSVTSLAFADDVAILSSSYKGMIKNLGILEEFCKNTNLSVNVKKTKGFHILTKHKTYVVNPKDNWQIGSEEIEYVQPGDFEKYLGARIDPWIGVGGPVLKEKLKDWSENLIKAPLKPAPKILILQTYILPKLFYNLLLIEPPFNLLDDLDVLVRKIVKEILHLPQCTTDGIFYSRGRDGGLALTKFSVQIPNMLIRKWRRHIVSRDDWMDLSYLYAGENLVDKILSFSAVTSHPKKWREEEFLRWSELRCQGIGIKYFKNDLISNSIFRNSSKVKSSAYIAALQLRANIYPTRETLARGRGGVNALCRWCGKVRETVPHISGQCYKTKNARIKRHNRVVSAVVDKVGKLGWKAMIEPHLRNSKGELRKPDIIFIKGDTAVVVDVIVRWEDNAGSLEQAHSEKVAYYLELEEEIKNLTGGKNIHFFGFVLGARGKWSEGNNDLLQLLGMDRSKNFKESICRLVLYSTIGMMAIFSDR

SEQ ID NO: 862 - protein, 1155 aa, synthetic construct
MSKPTGRLLNRRWSPRGDQTPGTPRGPRFLARVKRALFTPSKDKAGMTFLCANKTWRQNMSQGRLPKMVKVGLRVPWASQSCRLCDIELGSLREARTHLIRIHRPWKVFYRCSRCAGTFAHLPSVVCHVPKCTPRQTTTPADPGHYRCDLCTKVFSSSRGYSNHRRSKHTAAYLREKQGSQLKERNGNSHWSKEDTASPRQMIDEEGNSPGLYAKAAARFPTMTPRQIREKCRLIRASAKTSVVKSPTTHNANQDLRDLEVELPPQPSVAVLKEALEAQLTGGEGDEGLDPLHCSGRDLNRYVRKVIRLLCRQTPKVLGGKIKRTSPGNPKRLKQSKRFRYKIMQTRYRRDRPTLARWILDGKEKSECPISRAEVASGYKRIWEAGDSFKGLGGFAAMPPADNSPLCVPISAEEALRAVRRMDPKGAPGPDGLRRSDLLRWDNKGRKLANLFNTILHKGKLPSCLKRSRTTLIPKSSDSAKLADLSQWRPITIGSVMLRAFSGILARRLKEACPVHTRQRGFIESPGCSENLLLMDGLLRIAKKEVRPLAVVFVDFAKAFDSVSHQHIAEVLTRKGVDEWMRKLIQDSYKGCTTVVRTKHGETDRIHIKVGVKQGDPLSPLLFNLALDPLLYVLENKGVGFRVGGRSLTALAFADDLVLLSDSWKGMERNLQILEIFSSLTGLKVNPSKCHGFMLDKSQRRYTINDCEVWKLAGTPIHMVPGHEAVTYLGVQISPAKGILTPPLRTLVKDMVARITRAELKPSQKVEILRTYALPRLIYMADHGMACGSLLDGCDRDIRSAVKGWLHLEPHTTDGVCYASFQDGGLGLIKLAAHIPTVQLRRIMAMYNSTDECTKSVARATLPVSNIWALWNRVRGIKRSGDHSRPDLNAIDLKEASTAAWRGREFGRWCKLKTQGVGIEVFRADKISNSWLREPTGARFHESEMIMGLQLRTCTFPTLSSRARGRGRAHDALLCRLCGRQQETIRHIIGNCVSVKPNRMANHNKICGFLQRVAEEAGWLVARERRLVSDSGSVGVPDLVMVKGREAIILDVAICFEANQDTLYDSEVRKIKKYSGFTMAVKTIHPDVRNVSVCGFPMGARGKWHKNNTAILTKLGVSKKRAKQLAVVMSRRALLQTVDMCKVFRALARRQRVPR

SEQ ID NO: 863 - protein, 1180 aa, synthetic construct
MFSTPRRRLSRPRVVRSADGDSDQTVVGTVTSRGIRGRFLFTKDKDGGSPGTPRKAGVRMIAGKRLFPRLKNPSVIFMSWDKAWLSKLKNKILPSSVIVGLRVPWIVQDCPMCRISLGAVRETLQHMKKTHKARTTLMVCRVCATTFKTPHKAVCHAAKCGLAGSKAKAPSAHACDLCTRSFSSKRGLSLHQRVKHLDTYLRRLNAVPPAKTPRSVWSASDISTLISIQRNTPRGSGFVKDVAAALPHLTENQIRNKWRQIKSQAQQEEAVAPAAELEEFLGKLGTEMALEETVSVAKAHLRKKIVPNSKMGMSFLRRSVVSLNNFLWKLVRSWRGRKLTPLAGRKVRLSGLSSQFKNPAKRMSFKYVQTTYYSDRKAVAQFILDGRERSLCGIDPQAVTRTYMGIWEKEDEYVGLGQFARLPKADNIPFLFPITPDETLRTVRRMDQNKAAGPDGVRRNNLLVWDKKGEKLADLFNAMLLSGRIPSCLKQSRTTLIPKSSDPTKANEINQWRPITVGSVILKAFSRILTLRLEDACPIHPRQRGFTEAPGCSENLIILENLIKLHKSKKKSLAVLFIDLSKAFDTVSHRHIGDVLRARGVDKLIRRIIRDSYAGCTTKIVTAGGLTRAINLKVGVKQGDPMSPLLFNLALDPLLHTLENAGSGAEVEGRNLTALAFADDLVILSNSWDGMNRNLGILGRFSDLTGLKVNPGKCHGFLIGKGAAKRYTLIGCQPWVLGGEPIHMVGTQESVRYLGVQIHPLKGILVPPIRESIRDMADKISLAALKPSQKVDLFKTFALPRITYVADHGNANISLLRECDRDIRTVVKKWLHVEPFTTDGVLYSRCKDGGLGISRLASSIPAIQLKRLLSLYNSTDECTQAISRAVFPQKRLTQLWKYVWPEKVALGQKCDLDLGNNAGCKIDSRAWRQAEFERWCRLTLQGMGVAVFKNDKISNKWVLETRTGGLTESEIIMAIQLRTNTLPTLSVLRRGTAQGDRLDCRLCGVGKETPFHVVSCCNKLKDIRMANHNKICAFLRKESESLKWVVLSEKRLTTDEGRVGVPDLILTKDNKALVIDVTICFERDITTLENACDGKVRKYSVFKKAVSDLLPGVRKVECFGFPMGARGKWYEGNSRVLTEIGVSKTRAKTVATILSKRVLLRTIDMCKVFKLLILEKANKK

SEQ ID NO: 864 - protein, 1126 aa, synthetic construct
MTATPVKPWTRTQGPQGGNPPTKLRIPWPVVRRKCPECSVILRSLGMARWHVKTQHPGRELVVKCRRCGFLSGLRQEMVGHSCGGATSPQKSSRTRTAARALGAVGNPLATPVRGYITGSMSSPKTVRSPTPKSSRAWTSNDLQVLGDLVKRCGRSRVTARMAKLVLPGKTEYQIRGKLRSLYAAAMRAGSDDSEGEPDPEVMALSTPPGPVSAVRGCGRRLRWLARQMVAAMPDRGNPFTKALAVASRGAVVTKRQIRRATARAVEELSAIRASVVKHKNVGRLLVTPRPRPFSRRWVRREKFSRVRRLLETDPAKLVKWLLDGMEDTVCSIQLPKLRKVFGERWADAGASYVGLGQFEASGGADNSVFDKLFTPGEVVELRSRILTGSSPGPDGVSKLELLRWDPCGTKLSLLFNSWLVAGYIPRCVKPARTVLLPKSKDAKVLAGPGGWRPITIGSMLLRLYSKLLNERLSRAMPINLRQRGFIRAPGCTENLCILQSLVKKNYTDKGTLAVVFIDVAKAFDSVAHPHLIDALRQRGLDSHIIECVRQMYEGNLTRIELRGSFSEPIAMKRGVRQGDPLSPLLFNIALDPLLCTLEKKGDGIRVGAHNVTTLAFADDLVLLSSSWHGMKRNLDILAEFCKLSGLKVQGAKCSGFFLSPNPTSKTRALWCNHCVPWTIAGEGVSMLCGAETTRYLGMQVGPKGGIRSPDLMTLIRKWLEQVERAPMSPSQKLWITRTHVVPRLIYQAVQGNLSATRLRPVDRVIRNAVKRWLGLPQSTCNGLLYSRARDSGLGLQHLEKVVPALRAKTLFQLLQCDEEVVRELAWDRHGLYEFARRWRSAGGNDILRPLLPQEYTGLSDSDSSRDESAPMPVLKTAWRNPTDWRADAFADWTIRPVQGVGIAGFRGSPESNAWLSELSKRRLPYFPQCVRLRGNVCPTGEFRARGRVKTYAKCRICPRRLESTSHILGMCPVTRKARIARHNWICERLVSQAGALGWKVEREKTFHLSSGRSLRPDLILISRHTAHVVDVTVRFEGGYNTLQQAARDKVGKYRPIIPVLRKSLGVKTVKVWGFPVGARGLWYKGNTRCLMDLGSSRAKAKALGKKICKGVLIRSSKMIRDFLKQ

SEQ ID NO: 865 - protein, 1128 aa, synthetic construct
MAMYTPPGSSGGVSRLSLPLSADRSSEATLKGRLLFRRSHSPSHASEDPDSLPISPKRPRVGPLPRRTLFPSKKEKSGVLLFSWDKDWRKPQRLRGRLPPSVSVGLRAPWTGQACTLCKVLLPTLKAALLHFTKTHRPRKVLFVCLKCARTYRTAENLSRHTPKCVHKKVVSTGRLVPCLLCPARFSSRGISLHLRSKHPVEYFGGLRGPGQIKEPVTPVPKGKCFREQLERLSHGIPPVPEVHGMAEAITSHLSADPLGGGGIVTKKGARNLVIRLIKRLAGRKRVPIAPRKQRFSGNTFPKLRRRFRRVNEYRSIQRLWRTDFGAAARLILDGRVEASCDVPLQVIAKEYQNIWARSDAFLTLGQLASLPTVDNTGLNMPITSTEVVFVLKKANAGSAPGPDGLVRNALLRFDPSGRILALLYNRMISSGDLPALLKESRTTLIPKCSLGGGPPDVTQWRPITIGSVLLRTLSGILNRRLVAVSPPHGSQSGFVEGKSCSNNLLMLDSIISYAKHERKTLACVFIDLTRAFDSISHKHIDEVLARRGIDSMFRRFIHNSYSGCFTRIRATEGLTEPIKILVGVKQGDPLSPTLFNLALDPLLHVLEREGQGFLLGSRSISALAYADDLVLISDSQQGMLINLTLLEVFLHLSGLGVNPKKCRGFLLERCGTTMSLNDTPGWLIRGTPVPTLAPKETWLYLGVHISPMRGITKPLTLLILRKMLEKIAASKLKPSQKLTLLRGCAVPRLLYQADIGMVGVAELRESDRLIRKAVKEWLHLEPSTSNGLLYSTFADGGLNVPKLELQIPLMQLLRIKGFCGSVEQDLLQTWPMGALKKTLRTLWEHVQKYPAFKARFADTEVEDISKKEIRSCKWRSDDFNRWAALPLQGRGVECFRADKISNRWLANPQSFYMSQSDFVWALKLRTSTVSTCGRSSKLTKVDPLCRLCGEQVETLGHLIGCCHFLKPNRSRNHNNVCDFLARVATKMGWAVYRERHLRAPDRSIGVPDLITVKGSRALIIDVTIRLENDSSTLEEARAQKVRKYVKFSSSVIQSFKSVTFVRVFGFPLGARGKWHPRNSEVFTEWGLSKKATRVMAMSLSRLTIKQTISMLKLFNQTIKHPNSPSPC

SEQ ID NO: 866 - protein, 1331 aa, synthetic construct
MIVPLVFNGQDHPSGLSKWVPVRLGMGSTLRWRSCPACVFEVGHVWNWRINLPSGRWDQPLGELSRVPNGTGATASSPPLPVRKTISVAIQVQESDWPICPEVPSVVSESTAYAGSARSVESVEGARDPQPGEVDVASESTAYAGSARSVESVEGARDPQPRGVEVQERDWPILPEVPSVVSESTAYAGSARSEEPVEGAREPQPGEVVGAMYTLPEVVRADSPRVGADTLNEVRVLLPWLASDCPLCGVQVKGIVALGKHFAIRHAGVTAMYVCGKCGRSNISRHSISCHVPKCGGGVAAAGVEGEPASGFACDLCDARFPTPVGVSQHKRHAHAAAWNEVRLARRKVPGGEIRATKLWSVGEVQTLIQLIREHGDTVATYQLIAVELGNGKTAEQVRSKRRLLKIDMAGDCSNIAEEEDCSLSDPIPQAERSSPPSPQVLSSDRIREALVGWGDREGGEEVRAIASLVKDVDQNPFLIESSASELISKLGGGVERTGRARPPVREQNQARGWVRRLAQRRRAYRECQYWYSRDQARLAAQILDGAESQECALPPDQIYEAFRERWEGGGQFHGLGEFRTDLVSDNWEFYNPILAAEVRENLSKMSNGTAPGPDRISKKGLLDWDPRGEQLARLFTTWLVRGVIPRAFKECRTTLLPKSTDPGELQSVNGWRPVTIGSMVLRLFSRILSMRMARACPLNPRQKGFLASSSGCAENLLMLDEIIRRSREDGSPLAVVFVDFAKAFDSIAHEHILCALGERRVDTHVIELIRNSYVDCVTRVNCVAGYTQPIHINRGVKQGDPLSPLLFNLAMDPLIHRLELARFGLQWGDQGRISTLVFADDLVLVAGSVEAMNGSLGILEEFCQRTGLSVQPKKCHGFYMDKGVVNGCEAWRIGGAPIHMIPPGESVRYLGVQVGPGQGIVTPDLIPMVRSWVMRISEAPLKPSQRLRLTNTFVLPRLMYQADLGKVPATKLAQIDGLVRKAVKQWLHLPPSAGNGLLYSRVRDGGLGVLRLERLIPSIQVRRLYQMSRSPDLWTRTLTKRAVMQLDWEKLWIKAGGDAGSVPVMGTGEANPPDAGSPPVYPDWRRGENLAWAALEVQGVGVDQFRGDTISNSWIADPSAVGFRQRHWIAGLAVRTGVYPTKEFLARGRDKSGAACRRCLARLESCSHILGQCAWVQGSRIRRHNKVCELLATEAERYGWTVTREFRVDGPEGGLRIPDLVCKKADTVFVIDVTIRYELDGDTLARAASEKVARYLPVAAEIARRIGGRCAEVRGFPVGARGKWPSSNNTVLMELGIPVGRRRAFARLVSRRTLLYSLDVLRDFLREPEG

SEQ ID NO: 867 - protein, 1362 aa, synthetic construct
MSGNGKVGQDHRSALSKSVTTRLESGSGAVWRSRPTGGFETGSPVYWRISLPSGRWDQRTVERVIPRRSVGVNTDTLLPGPTLKPGNIVCKSSSVGTQTSAADVGRPYPGLAPACRQDNRSQLLIVSMTFVNSRLRESEYIEISQQPARTTGEVTDVAGSSMGQEGPEVGDGLEGVLPGLGPEGPVPGQPNQARLAVPVMTATDTLAPRVSTPQSASTESHGSPQRGERVGQSPDRGEGANDQIRMAVTSPGADEVDEEIMLRSAACEEGPLEVLMPRPDLICQLCGVHAGSVGMLGKHFASRHAAVKVVYKCRKCGRINTNSHSIACHVPKCRGMGGGGVATQGEFACLLCPARFGTGVGLTQHRRHAHPEDLNRERLAAVGVKSRLRPTKLWSMEELERLITLSRRHSHDPNVNVIIARELDTGKTAEQVRSKRRLLVSELAGDDPDTAAMERIVDPIDELANPVVLQSPPNSVRNELRRALDTGGDEISQNEIRVIAESLREVDQNPGLIESSASELITLLGRGGRAPCRRNGEDTVNGRVQKGWERRLSQKRRDYRVHQRLYVDDPARLAALVLDGSQGAECGIPIEQVYEAFLDRWEAEPTFRGMGGFRSVGTADNGEFAFPILACEVRENLGGMKSGAAPGPDRISKQALLDWDPKGEQLARLYTTWMMHGVIPRAFKECRTRLLPKSADAGELSDVSGWRPVTIGSLVLRLFSRILATRLARACPLNPRQRGFLASSGGCADNLVVLSGIMGRARRSGAPLAVVFVDFAKAFDSISHEHILCALRQRQVDLHVIELIRNSYVECVTRVGSAGQSTPPINMKVGVKQGDPLSPLLFNLALDPLIQALQDLGGGFEWGDQSVAALAFADDLVLVSGSDAGMRRSLKIVDSFCQLTGLRVQPRKCSGFYLDKGVVNGCEPWTMGGSALPMVGPGESVRYLGVEIGPLRGIVTPDLIPKLQEWIVRIKRAPLKPSQRVRVLNSFAVPRLIYQADHCEVPVAALAKLDLTIRRAVKSWLHLAPSTTDGLLYSRNRDGGLGVVCLQRMVKSIQAKRVYRLAQSDDSLTRAVTLDTISQSDWTRRWRLAGGPENEVPPPLGGSESLSLPDWRQEVSRAWASLQVQGVGASLFRGDKASNSWFTDPARVGFRERHFIAALALRAGTYPTREFLARGRNKAGAACRRCGARLESCSHILGQCPSVKGSRVRRHHKICELLSVEAERAGWSVTREFRLRTPGDGGAPGELRIPDLVCTKAGQALVLDVTVRYEMDDSTLARANEEKIAHYGPVATQIGEMVGVGNVRVFGFPVGARGKWPAFNNRVLQLLGLSVGRRAQFAKLVSRRALLYSLDILRDFLSEPTW

SEQ ID NO: 868 - protein, 1268 aa, synthetic construct
MLVREEMNGQDHPSGVSKWVSTGLEEGLMAVWQSFLTLGFVVGFEVSERSNLPSGRWDEPAGVTREVPRKGLEIKNNLPKLYMDKKSRTAQTQTSAEDWCTMSVWRAPTAEDPQVIVEAMTVVNSYIGYGDAEYLPPTRPVVSEKSPLDEILEAYAVRPKEKHQPQLTSEEVDQGEHIVTPDPACITITLPSPKLECPVCGVETSGIMMFGKHCANRHAGTQVLYACRECGRTNANGHSIACHVPKCRGIVENVREEGEFACELCKKGFESKVGLTQHKRHNHPVELNRERCAARGGGTGGIRGTKLWKAEEVKTLIRLERKYEGGPMANILIAEELGSGKTDEQVRNKRRLLLAERARHGLDCEQGEQEPPETTITPLPVPDSVHNQLRAALVGRDGMENESEVRAMAEFVRDVDQNPDLIQSSASDLISRLGEHRAPRRGGGGGEQRRAMKGWERRLSLKKRDYRVHQQLYLRDQAKLATLILDGEDEVECTLPIEEVHGAFRERWRGKGLFHGLGKFKSSSKARNEEFYMPILSAEVRENLAKMKNGSAPGPDGIRKQALLDWDPRGEQLARLFTAWMVLGVIPKEFKACRTRLLPKSRNAMELKSTDGWRPVTIGSMVLRLFSRILTMRLSRACPLNPRQRGFLASSSGCAENLVILNGIIKRSRLTGDKLAVIFVDFAKAFDSIAHEHIQCALEQRHLDQHVIELIKNSYVDCVTRVGSAGIKTPTIDMQIGVKQGDPMSPLLFNLAMDPLIQRLETKGDGLSWEDRKITTLAFADDLVLVSGSDRGMRRNLKILGSFCQWTGLKIQPKKCHGFYLEKGVVNDCKTWKIGEEPIHMIGPGETVRYLGVEVGPCHGIKIPDLIPKIQEWIGRIKKAPLKPSQRVKVLNSFALPRLLYQADLGGVPATTLAIIDGMVRNAVKTWLHLPPSTCNGLLYSRNRDGGLGVPRLERAIPKIQIQRAGKMASSEDEWTSRMTMSTVTREVWCRMWRQVGVGREEVPEWTLESNVSGGSPVIPDWRQAENMAWQKLQVQGVGADQFAGDRLSNSWLYEPMKVGFRQRHYVAALALRAGVYPTREFLTRGRPKQHATCRRCHAKLETCSHILGQCPAVQGSRIRRHHKICDLLAIEAERVGWETTREVRVVSPEGVIRIPDLVCVKAGKILALDVTIRYEYESGTLMAAAEEKVVHYTPIKEQLSGLMGGGTVKVMGFPVGARGKWPSCSTAVLIELGLTAARRARFAKLISRRVLLYSLDVLRDFLREAVR

SEQ ID NO: 869 - protein, 1354 aa, synthetic construct
MAKRVAFLCGRTDHLSHYLIINGNGMTTSRIFGQDHRSALSKSVTAGLEVGSGAVWRSCLTPGLEIGQRVYWRINLPSGRWDQPTGERVVSKRSVGVNTMAPVGGRWQPLGAAVRKTSSVGTQTATSDLVRLNLRRIGEYEGVLPQVIVESMTFVNSFIEVERARVVLTSQPVNAEGVVTEGAGTEDSRGEPDPGGAQRSGDTLADQGAQVIPTDVATSAPMGDPHEGGNREGADDQVGFTETTPVAESEEEQSTPRRRNIDTDVFLEVLLPDPDPVCSLCGVHIGTVGRFGKHFAGRHAAVKVMYKCRRCGRSNQNSHSISCHVPKCAGRGERVAQGEFACDLCQARFQTAVGLTQHRRHAHPAEWNREKVAAAGTSGKFKGTKLWSVAELEILVELSRRHSDDPNVNKIIATALGNGKTAEQVRSKRRNMATELARNGSHEAAQNGITDPILALAAPVVSQPPPHLVHTELRMALGEGGGEESDNEVRAIADLLREVDQDPGLIESTASDLIRRLGRGGGAQGQRRGEGTGRVLKGWERRLSQKRRDYRVHQRMFTSDPARLAALVLDGSQGTECAIPISLIHETFRDRWEGEVAFGGLGGFQSRYTADNGEFAYPILAAEVKENLNKMKNTSAPGPDRISKQALLNWDPRGEQLARLYTTWLVHGVIPDVFKECRTRLLPKSGDAGELGEVSGWRPITIGSLVLRLFSRILTMRLARACPLNPRQRGFLASSGGCADNLMILNGMIRHARGSGASLAVVFVDFAKAFDSISHEHILCALEQRQLDRHVIELIRNSYVNCVTRVGSAGEFTPPINMKVGVKQGDPMSPLLFNLALDPLIQALDDLGGGFGWDDHTIAALAFADDLVLVSGSDAGMRRSLRIVESFCQLTGLKVQPRKCHGFYIDKGVVNGCDPWVMGGTPIHQVGPGESVRYLGVDVDPGRGIVTPDLIPKLQEWIVRIKKAPLKPSQRVRVLNSFAVPRLLYQADHCEVPVATLAAMDLTIRGAVKAWLHLAPSTTNGLLYSRNRDGGMGIVRLERMVPTLQARRIYRLSQSEDAWTRRVTERTVAPVEWQRKWRLAGGSIDEIPRLGREEGTDARGSSLSLPDWRQDENRAWAALRVQGVGAAQFRGDKVSNSWLSDPAKVGFRQRHFIAALALRAGTYPTREFSTRGRNKEGATCRRCGARLESCSHILGQCPFVKGSRVRRHHKICDLLAIEAERTGWSVAREFRLTTPEGELRIPDLVCTKGSLVLVLDVTIRYEMNSETLAQAYTEKVVHYAPCARQIGAMVGGSEVHVHGFPVGARGKWFAPNDRVLSELGLAAGRRAFFARLISRRALLYSLDVLRDFLCGSVW

SEQ ID NO: 870 - protein, 1219 aa, synthetic construct
MIKCKSDMDRNSKTILAGGSPRIKSRLRDARGQASSNRARPPCGSVAEDRRSDGGHPGSEPLLVPGLRECSVVLTRLHERDVGAERPPGVMCSDTEPFGARGSAEETPSSGHPDASQGGGPAVANPTPEEPHVVVLLPIENYTCALCGVSAGTLMWVVNHFATRHGGVLVRYSCRLCGKASTGWRTIVCHTPHCNGGIGRRQRSGAFACEECGRGFVSNRARSTHERHVHPDLRNRKRSRQVPAASGGSSAFTQTEVEAGVLRALGEGVDPKRPRLIEETDSPMLDAADPPVAQQTLILPDGGLSVGLREVARQMVGGAEDGEEGYVRVLSAWLEGDDEVPALVESLASEILLRLRDVAVQQLPAVRTGRSLGGTAGPRWQTTGKARRLAYHACQLKYTRDQTRLAAELLDGTCTSDCPLTTEEVYGEYCGIWEGVTAFGGLGPFVPFGLASNGHMAGPISAEEVKRCLNQAANATAPGPDRIGKQNILAWDPGCEKLSHMFNVWWITGVIPKCFKQCRTVLIPKTSDQSALGEIGNWRPITIGSTVLRLFSRVLTKRLVDTCPLHPRQRGFRTSPGCSENLEVLRSLFEHCKGERSQFAVVFVDFARAFDSVSHEHFLCVLRGMQVDPHVVELIRGSYQDCVTRVEIGDRQTPEIDMRVGVKQGDPMSPLLFNLAMDPLIHGLERLGKGLSVSGTKVTTLAFADDLVLVSDSWQGMAHNLGILEAFCDKTGLKVKPSKSNGFLLSPTRDSFTVNNCPPWVLGGSPLRMVQAAETVGYLGVRVSPWKGIVQPTLYEDLLRWCENINRAMLKPSQKVVMLNKFAIPRLLYRADHCDVKSGTLHLLDRTIRERVKAWLHLPPSTCDGLLYARNRDGGLGICKLARLVPSIQARRIFRLSNSTDGVTRSLLDSDLAKSKFKGSWLRAGGKIEHLPQLGSEGQNTESAERGEAAGPMMPQCAAPLDWRHDEFLKWAGLNTQGVGILSFYNSKVSNSWLAKPKGFKERHYIAGLQLRANVYPTREFRLRGRGMVGASCRACPHRLESCSHILGQCPATHRSRIVRHNKLCLLLATEAEGLGWEVRREWAFRTPSGELRRLDLVLIRDSLVLVIDVTVRFEYAPDSLTRAAAEKIGYYGPHKSTIARELHAREVRVFGFPLGARGLWFPGNWEVLTAMGVGETRRKYFAALLCRRALLYSLDVLRDFNRLAGLGQGGQRGRRRWR

SEQ ID NO: 871 - protein, 1163 aa, synthetic construct
MLKRNGERRDLDDQADSTPHKIPRKGSAKRTLFPRQHEGNHVFFLSWEKGWRKEMGSSNKLPHSVQVGLRFPWNPTACPICHCLLSTGTTAIAHMRRTHRPRKLRLYCARCSLQFGRHSQISTHVPKCGERAKATRAGSTDFACDHCPTAFASRSGLANHKRVKHTETYLKELNSTARDPKKGRAIWSHEDVDYLGVLLAKSGGASEALLEAQGHLTQYSRRQIASKCRQLLKTQAESKLALTQGTVGVEYDRAAMERPLSPLPPTRMVKTLLDASLASEGADGLIVPKTVDPKVIDAYLREVITQLAGHRKLFKTKSKTATRRIRRRATKRTEKAANYRRLQRMYMKDKRATAKYILDGASTSACPVNPRTVEQAFKQVWQSKDLFRGLGQFGLLPSSDNSVLCGPISPAEVLRTVKSIKRNSAPGPDGVRKTHLLKWDPTGKKLASLFNAILYCGKLPKCLKGSRTVLLPKTSSEKDQLDIGNWRPITIGPIILRAFSGVLNKRLTEACPVHPCQRGFIDTPGCSENLALLEGIMRLSRLEKAQLGVVFIDVAKAFDSVSHKHIQEVLERKGVDEQFRLLIQDSYKGCHTVVQTKVGVTGRIRLRRGVKQGDPLSPLLFNLAIDPLLHALEKFGIGFEFQGAKVTSLAFADDLVLLSNSWAGMAKNLTILEHFCDVTGLRVNPKKCHSFMIKRNGSKQYSVNGCEQWTLSGIPLRLIGEHEAERYLGVMINPRKGIVKPPLRDTVKGMLENLSVKGLKPFQRLELLKIYALPRVIYVADHGNAGTAELAACDRDIRTRVKAWLHLEPSTADGLLYARPKDGGLGVLKLSVHIPAVQLKRLLKLFNSEVQNIRTIARAATPDRALERLWNRSQGIITSKQDAGTFTPSRIDESKLAAKVWRATEHQRWSRLPSQGVGVTVFENDNISNAWLRDLSRNGFTTAETILALKLRTSTVPTRANEMKGRSPRTNEVVCRLCGTDKETVAHIMGRCRTLKRNRMSRHNKVCDLLKGESELKGWSVVQEKKLTLDTGEVGRPDLIMVKGKTALVLDVAIPWEVTGDTLADAERGKSDKYKKFVRTVLELYPGVERVRVSGFPVGARGKWHKRNDGILQEIGLSKTRIGSFSRLLCRRALLQSVDMCKTFRGLVAPKGARGAGLRGNLA

SEQ ID NO: 872 - protein, 1027 aa, synthetic construct
MMSNRTLSGTDQIPCTDPDCHQLFNTVRGRNIHFTKKHGKGRSSNSITNFENDDQCTPNAGPSQHNRMLCTVSNCNKSCSGTVGLTSHFRQAHPVLHINQIANKYDSPAPNTTSECEESTPVDSPRSTTRKNENEQIQEIMANYENDLQVLLSESINTDKLDGITDKLFVEFRNIIKLLPGPQHPASKFYEARKKKQQFQSDHRTFSTTTNPQRKSKRERQRRKEQYNYDLCQFLYYNQRKKLVQRIINTQGYEPCKIPTADLYDSFKSRWCVKNSKVLHQYETVEPEEQKTLDEDFLDRFSEEDVKAAMKNMNIDTSPGPDHIYMRTLKLVKCEKVIALLATIMLQWSYVPKIMKEAKTILIYKGGDKSDPGNWRPISIQSIIRRIIERILDRHLRKFITFNNNQRGFTKHFGTLINTNILDGCLKHAKSSETDITIVLLDIIKAYDNIGHDHLKNCLLSAKLPSVLRNLIINLIDDNFTRIQACGSQSKPISFLRGVLQGSPLSPSLFNLSIDFILRQLSETELSEKYGFQLTPELPNLSVTGFADDTCVIGNSKGSAIELTSMAKHLFNSIGLDISAKKCIAITLIEGELLEDTLQIDNETTIRSIRNNESVRYLGVPFTDEIIFDEKKVICNLKNDLNTLSSSAVLRPDQKLNILNQFICPKLTYPFQMAPFAKIKKDFLEDVDIIFRSTIKTIIGLPNDTPNSMLYSPRRYKGLGLLRANWECYIQIINSCVHLKKESNPHINFTRCLDTDIEKCRIALKLEDNCSAFSGNEKTLGQRIRNHLRNKEFDIWCNLKQKGIGVILYKECPKSNNWVFSKFGLSCSEWTNAIKMSCNTLAVRSIPGRSTDGPLCRHGCKESETLGHVLGSCPKNSLLINARHHKVRNLIAEALRVKKFEVLEEVTCVALNGSTRRVDILCFNPVTRKGWIFDPTVRFENHEGQALEVDQEKKAIYEPCIPYLLSNYNLLHLDVIGLFIGSRGTIPKFFDEFRKSMNLPHSLTEDISLTVIRSSLHIHHNHTYNPI

SEQ ID NO: 873 - protein, 1002 aa, synthetic construct
MTNRARRNGIPIMASTSTAHIPEAPDPRNLNQTDGQVGCQYCGKFYKGKRGLGIHIAKQHQEIHRDQISQQYQAPPAEIIADNPDLNPQYIDQDDQQSQESQILRDRIQSFEERFEEMANEELNPEKFEQCYKDLVLFLSDADGTLPGPKHPSSKFYHARKRRNKNYTTNDRKFAESSNPERASKRDRQKRNEQFQYDLMQYNYYHRRKKCVNQLMSSDKNPQCQIPMKDIQMAFQERWGTPNEKMRSEYGPEVDSIKQAEIDAEFNFVIPSQAAERAIRGINNDTAAGVDKITIRTIKNLKCEKILASITTIMIRHGYVPTEFKQARTTLTPKKGDLLRTENWRPISICSILRRVVERILDRVIKRYISISEHQRGFTNLPGTHINTALIAACLQKAKVKKMDISVVLLDIIKAFDMIGYNHLEQTIKHTSLPTMMKTLVMDLQTDNYTQIHVNSDTTQKIQLRKGLLQGAPLSPTLFNLSVDYIMRELTENEIAHQFGFPLVPTLVPLSAAGFADDTALIGNSGNSAVQLAAMAKQLFKDTGLEINPRKSAVIHIVKGKQVVSDLKIDDNDEIPGLKIGEVIKYLGVSFQGEMIFDQEAVINSLNNDLKQLVTSALLKPEQKLGILNQYLWPKVIYPFQTAPVGKIPQSFLEDMDKITRSSIREILGMPGDIPNSMLYSPAKYKGLALVRAKWEAPIQVHNICQTLQQAGNDHLMEVRDFEKEMEECRNKLGVTEEEYEEMRSSDADESETPKKISAKFRATLREREFDDWCALPQKGKGVALFKQEPSFNKWLMTKKGLSSSEWTSSIKMTANVAAVRVIPGRSTQTTRCRHCNEIETLGHVLGACEKGTLLRNARHHRIRKMIADGFRKTGLQVFEEVHCVSDTGSTRRLDIIAINTNKKSALVLDPTIRMETGVDQPESVNTEKKGIYDPCIPYLKDKYKLRSVEVIGLFIGSRGTITTFLHEFVKQHKLGKSLLDEIVISVLKSSAHILHNHLYSQ

SEQ ID NO: 874 - protein, 1116 aa, synthetic construct
MLLSIPLFRGLRLVGLTSRLVGRLNLKFVPKQTRLASEVQPTCPARSVDLTLNNGASALTLQSVAGGDNSANTAEGRNSAPFACDIDGCDRSFGTARGLGQHKSKAHREQRDQQLGALRGENLGRSVWGAEHLLLLAREELEFCRRDPGAQQKAINEYMSSTVFNGQRTVEAIRGQRRSQRYKALLAQIQAESEPPVVEVVPPPVVHEPVEAGPTLGQVASESFHRVLVEFRDKESPIAGFIPGEKGSAFVGVNMCQDDLNRGWENWVSNAQRAAGIERRVKRANKTSTSRPSGVDRETSALNVRSNPRVGTPNRTQRRKRWRAEVQSRFERDPGTTTKDILGGNSITALCDPGTLAEHWKKVFSSESVVDPRRPKPPVAGCMWSLWAPITLNELKGALAGTKHNTPGSDQLGKRELLRLEQSDLLAWFNLWLFSGRLPSQLTRADVTLIPKCDMAAAPAQYRPIAVCSKILRLFHSILSKRFRTVALPEEQRGFRPQDGTFESTWLLKTILDSARQKPKATFVAFVDISNAFGSVSHDTLLKACVHIGLPPPLIRYVETLYSQFTVKIKGGTGDEVKVGCGILQGDPLSSDLFNFAMAFICQELDRKVGYSMEKRVAGTDSLLSYASYADDTFLIAETREGLRMLAGQLEGSLWKAGLTINASKSATLAIDVAGTKTKTWYCSPQPFIDLGGRRVPALSVSGTYKYLGVNAGARGFDNSSIKPYLVTRLERLQRASLKPQQRLYAVRQHLIPALYHGLILGGSKAGALKDLDCLIRKRIRSWLHLPHDVPMGVFYASIGQGGLGLPCLATKIPTLRSLRMERLQKTDQENLKKVVESETGQKLATKDLTRPRLDVADHRVSAKIAENQHWSGKLHGSVDGRGLNQHGRVPAAHAWMRDPSLRISGGEFIRALHTRLACLKTPLRAARRGNTSAMCRSCADSVCSLGHILQVCPRTHGLRVKRHNDLVKMLVTALKRQNYEVIEEPHFRLERSFCKPDIVAIKRGQVLVLDPTIVADGFPFCEAMTTKERLYGNDEVLQQVQLMYKERFGSVPAGETPPRVIVSGVAVNWRGGWDFQSWAVLTKTARIPPRYLILASIRVLCSGWSAWAATMRRTN

SEQ ID NO: 875 - protein, 997 aa, synthetic construct
MAKLNEAQRKRAKRAETRDETKPRKGVWTDEEIEQLHVLCKKFEGERFINKLIEVELVTKTNRQISDRRRTEAKKALTDFATKAPEANPGRTEATKALTRPATKAPRDTANPRARKRGKTEPTPPSVATDTIDGSLFIEWLTDKELSRDNPERCEAINILTEAIGGTDVTDQVENLMKKLTEIWTVDDRINKKPKGKPTKARARSIKGASEYRRVQELFKRDKKRLATEILDGKVDNSCPVEVDEIESTYRERFGGISQGVDLSDFPAPLRTADNSETLKPFTEGEVRRALLKMRRNTACGPDGITVGALRVSRHLLTITTMLNVFLLTGKVSKLIQGNRSILLPKGGDPSDLGNWRPLTISSVVLRLFTKLLASRLENAIYLNPRQRGFISDGGSGCADNVQCLDHLIHHAKTEGKTIAVALLDLAKAFDTVSHKHICSGLKRLGVTGHFIGLVEELYDGAQTYFKTPKGITGMLPMTRGVKQGDPLSPILFNVAMDPLFCLIDAEGSSYDLEGTTVSMLAYADDAATVAGSREGLQRNAELAVEFTKTTGMKLNVKKCCAFVIKPLAKRTYAVNDCSPIQLDGTDVPWLTPGKCTKYLGGKVDPWKGFVTPQPLKKLVTWCKRIHKAALKPRQKLSILTQYAITRVMFSLGLNIPSKGSLEELDTLIRKWSRRWLHLNESVNNYMLYARPRDGGLGLPKLAKEVPVAHINNLLSCISSKDDTIRRVAESANFEVKIEETRDLFSLPSWKAARVSNTGWRKQEARAWAALQSQGKGAELWYDDAVSNTWLSPRSFLREREVLTAIALRTNTVPTREALGRADKGRDVRCRRCGSAVETLGHITGACMFVKRNRIKRHNHVCFAIRRSCTRRGWAVLEEPRIVVDHQTFKPDLIVWRDNTAHIIDPTVVWDDSLKSLQTAAEDKHRKYQGIRDAVGKLTSCTEVICHQGFVIGARGTWYKGNNSICEAVGIDAQSRKYICQIVLCGTIKLLGAFMNL

SEQ ID NO: 876 - protein, 1126 aa, synthetic construct
MLRQRGDAGLDAPVPGVAVAEDACNGPHGGERIYMPGVVTNSGTVESVGEGDSSKMVVPMPFGVLACPCRQAFCSVYEFELHMDRAHVDVDLRYRCDICSKTCFRAHGAKIHRSKCRGQKTISRTDLPWGCNVCAMAFRTKSGLSQHKRHRHPAIRNLERKADCKSVVEGEVTVLTVKPTKLWSLDEVERLRELDVKHHGKRSINLLIAAELVGKSNKQVSEKRRALFGSRAKSVGKKSVSVPAKRKTEECLARSVERVPEQAFWQFVENSKNSIEGLRHKEALQTLVDLLQDGDVVRSMSGVSQLLADITPVTKPQLRKGGKSKKKVSLKVRRRSKTKAEQYRHQQQLFTSNKKKLLAEILEGVENSRCPLSVESVEETFRSRFEEGSSKVDMSHVPRPLNSMDCGNILKPFVPSDVMKVYSKTRRDTASGPDGICLKAIQRWDPRGVKLAAVFNIFLMSGKVPESLKSNRSILLHKGGETDEIGNWRPLTIGCMVLRMYTKILAERFQEATPINPCQRGFVRGGGCDDNIHLVEGLVRDAKKRGKPISVCFLDLAKAFDTISHDHVIAGLVRFGASEHVTRIVQDLYQFSKTRFTIPDGTTGEITINRGVKQGDPLSPVLFNIAMDPLFCLVEKSGVPYRLEDGTAVSVAGYADDTLVVSGNRDDLQVNVDLVSEFCRAAKLKLNARKSYAYTIRPVAKTFLVNCGDQLRISSEVVSWIEPGVPAKYLGARMDPWVRSVRDDPNEDLRSWCVKIGKAALKGRQKFILLTQHLLPRLRHRLAYGNPGKVTLCELDVTTRLYCRKWLHLPECISSAFLHTRQGDGGVGLPCFEKEVPMNRVKSLYRMLSSKDSRLLSIAHAIGMGEVLEDHCRRWAIDYPIVSVSKLVRRVKRSMRSGWESLGSQGLKGSFWKSCSASNGWMSREVLSEREHTVALQLRSNTYPSREAICRGRPGSNVACRRCGLSVETLGHISGRCMAVKRSRIKRHNKICGILVSSTHGSKWEVMIEPHIKSEGKTYIPDLVFLRGSEAVVVDPTVVWESKVTSLSHAASVKVAKYLPIVDALKELTGCSSVSVYGFPIGARGTWYKGNNRVLDVLGVHRSKAKFFCLTALCDTIKLLRVFTDR

SEQ ID NO: 877 - protein, 1382 aa, synthetic construct
MESWGTLTLEGQQWYRNGDPISTGDLDYYLTDYAVPSSSQRDGDTGSDTESDSEEDDRPQTEADGLSGDEHGIILELPSATQQCPKCSVVLNTLRTLQEHLGATHGIRDVLFRCRLCKNIFDRVHRLECHAPRCKKGTRTPSGAGLKYICDGCACRFPTKSGKSQHERHRHPEIANNRRIKATELIAKQKREKRHAAKRLKRQAAESEQEELLAAKERARLQANREREAILVGEKPGEANETRVLRTEWDEVATEIFLDIYCEMGDEKGLHTRVRAALQVAGYDIPLKRISERKRTKGFRFALLDKQEQNRKEEEVAPDQAGEAARSTTKAYPSGQQADHNVECMDTVTAETLLLSLERESEARILQTKWDTAAIKILMDYYCITGDTKGLHTRVRAALRVAGYDISQKRISERKRTKGFQKSLLERQKRSGIEQEVAPEQTGEAARSTPKAYTSGQKTTHATECLDSSTVETLLLSLETSGDEPEARIAALCRTVQKTGTEGEAAEVAYAAHEQLLNDFIAPGPMAPTKGAKMPRYRKETKVRKIRTKTLKGKAKERVERYRNLQQKWKRNKKNAVKQVLDGASDAKCQIDAEVIEATYADRFESAGPRVDLSNYPGPFSEPVLPKIATETGSDHEKQSGQNRQSEPCPKRLLEAVSASEVRKAVRAMRTGSASGPDRITVAQLKKKTEENPGFLAGVYTLWMMTSKVPEKLKTSRSLLLPKGTTDLQNIGNWRPLSISSVIMRLYTKILAKRLTKAVSLHPSQRGFIPAPGVEQNSVLLEHLIRKQKKEKGTLAVAFLDLAKAFDTISHDLFAKGLQRLGVPSQFIRVVEDLYDGATTSFTTKNGETRQIEINQGVKQGDPLSPILFNVCLDPMFCSLERDGKGWGSDKTSITALGYADDTAVLSDSRAGLEKNLALVKAFCDQVGLRLNVNKSYVFHIKSDGRTFTVNDTAPYEIDGGRIPWVSPDNATRYLGKMFGPWGGMSIPNMKQQIEEWARSVAAAPLKPMQALEIWRDTILPRIKARILHSRPSAALLKSLDIQIRGHVKTLLHLPEQISNAMIYAKTRNGGLGIACLEDDIPDLTIRGLHKLCWKAKSDTIRRHAQNLGVRDTLEDLCTRYPQCKPAEPGNKKREEEDPQRDRAIPRSKWCEYLASQKTQGMGSTTWMKYKECNAWIRAGTFSNGETIDAILLRANCIPTRECIGRYTQSTDTICRRCGMTTETSGHISGWCPSVKRSRILRHNSLCKILGNKALKQGWTVHWEPILNGPKGKLKPDLIFVKDEVAVVVDPTVIWESDAECLVKAAQVKVAKYSYLETQIKDRFEVTEVQVFGLPIGARGGWTPGNDQVLRALGIPVGQTRRALSVRALGGTITLISLFFDQ

SEQ ID NO: 878 - protein, 985 aa, synthetic construct
MIGLSQLWAAFSSTAAVDTPQRIMRVCHGPLAVIDPGGDDELRRLASAEIEFGKPVNINQRLHDVFEHRTVQAISTIRKSARYRCILAKVVEDRQGAEVESDRQNEARASDSDDSLSLAIENLMKRVAELESDSSSTVRAVLAYARKSLADGDADSGIELLPPEICSPVAPRRRTCVRGTQKSRNTLAPTPPAASRRRTRVQREPQNRDQRRRQHYKLVQNLYKSNKRLAAGVILDDQPVRPVYPPIEKIDEVFRGRFSRPSPPDNADFTVCPGEEMSMSYLTPAEIQAARSSMKKDNAPGPDRNATMDTVLSLELPALEILFNVWFVLGQVPVVYKKARTILLPKSGDLSDPNNWRPITICSIFGRLYAKLLANRLSHCAALCERQKAFLPVDGCGENTVILSAVLANAHKARRPTHLAFLDLAKAFDTVPHTSIIRALRRRCLPEHFIKIVANLYTNATTSISTGLESTEELPIRSGVKQGCPLSPMLFNLVLDELIRGIGTNNGIALGDSKVAIMAFADDLILLSGSADGLQANLQVCEKFFADRSMAINARKSMSLSIVRAHGRKTMMTDEGCQWTVGGERLAAIRHTDDIKYLGVQYTAIGRSVAKFPKLEEWLRRLKAAPLKPQQRVDFVRSTISSRLIHLLRLCRVTAKMLNALDRRIRTFVKGVLHLPPGTSTDFFYLPIEKGGLGLREFRSLIPAAKLKLIGSMKGSSDPVVVEAVGHEHWLREERWCERMVSLTGMKDETLRRRVERYISSHTGQTQSGFTLLPGQSRWLERGRGLSGREYVVGCHLMSNTLPVRTRTFYGGPDRITTCRYCHNVPETTSHALQSCPKVRDAVTKRHNTILSMLRRFLTPNHDAVIREPWFRGPAGNMNPDLVVKQGRMVYVVDLTVPYDSSIGFMDGQASRKVDKYAVLVDLIKEKYQAERVEILGLAIGARGLLTQRGWSVTQKLGLSHKQTSCLAMTALKQTCGIWGLFQDR

SEQ ID NO: 879 - protein, 1094 aa, synthetic construct
MESNTSRELGTLPPGDGRVGLGATALTVMTRTEVDHETATRPPGGRPAAEVPRAAETTNVCPNQACKRWFRTPAGLTLHRRKCQPDTLAAERLSQQPRRRNWTLEEKALIRARAFELRKADGSLPCTTLARLLIERGDSDRPIESLKRLIMAFDRDGLLAPDQTIPRETREILNESAERPLVADPLEATGTLSDATMPTDSQGPTALDDREVDVESPVAAWQRRSLETLMTWQGEEKSVLPPGDLAALSEDAITIAFEEWLKGQGWSPPAAPPRRKKLTNPVSKPFSKRKARAAMVEKTRRWFDKQPHRTVKAIVKGTFGLTDPKPAAETVEFWAKSLSTPVEVDEVHLEPMAPANYALCNLIQRCEVVAAAKTLRAKTAPGPDGLTATKVKTLPAGQLAQWFSLFLFRGFVPRRLNDARVTLIPKVAEPAGPGDYRPIAVSSVLLRLFHKILDYRLQAIPLNNDQKGFKQCDGTRDHSFLLRSLIKHVRAEKESLMVCFIDVKNAFGAISHQAVIEAARAKGVPPPMLTYLQNLYANSFLDFGDGRASVKLGAGVRQGDPISGSLFNLAVDCVRRGLDPAVGFRVGTSNVQSLLFADDSVLFASTKPGLQIQIDRFADGLKRLGMSLNAKKCATLCIHRTSLNRSAAVHVDPLPCLGFGGEKFPALSSSDTYRYLGVKVGFGGTDTSFWSEELKTRLDRLNKSYLRPQEKMFGLREVVIPGMIHSLVLSEATKGLLRRLDTQIREMVRSWLHLPKDTPLGFLHARAVDGGLGVPSLTARIPRLRSERLIKLNRPGYSEAMTAVLETPTGSKLLDSATKLHGWPEKTRRKQVKQLICGKASEFEAAKQLLWNSVDGSGLKEIGSFSSGAGGKNESKWVTDPVRYRMSGGEYVRAILVRGGLLKTGERATRGVGREGQRTCRRCRQVQSLGHIINNCPMTHGLRVARHDRFVKCLKSALENRGWKVQIEPRVKLAKGSFVKPDIVAAKGDEVVVLDPSIVGAKVPVERAQCAKKNLYDRAEVKEHGFEFAMSCGFKPKSFDVAGVIISFRGVWSLISWTLLRRLGLPVRLLNFWVIRLLNDAYYTWASELLHRAG

SEQ ID NO: 880 - protein, 968 aa, synthetic construct
MASGSTDPGPASPGNRVVSGATFFSCQECCRVFDSLRGQSQHRRQAHPDSYYDAALAGIGGRKKARWDHEESSLMAREEKRLLALGVANINMELVKCVPGRTLEAIRGHRRSSAYKEIMANIDELANDSDTSVLDVPSSPARTVPAANNIDPNISPLLFSDDEPVSERAGTGAYLQADIMDPISPPLFGDASVRERTGTVGSQAAEHGIRRALLDATARDQEWLEMSHDDFLHFRSSVRADHTGDRLQVLVDTEYDTWHAKTFHNKRERGERSKKAQARGKPKAKPRSTADGDAEGEPVAMAKRYRRPSAVKRREQYARVQSQYNINRSRCAKSVLSGDWAKEPPSLPLSVQEGFWKPLMETPSKMDLRSPVAKFEVCHDVARPVLVKEVQEALKGMNDGSPGPDGIDRTTLRGVNAKGLATHMNFWLCCGCSPTAFRDGITTLIPKSAESQQPGEYRPITVTTIVARLFHRILAKRCERHVPLSPRQKAFRRGDGLCDNIWLLRSTLQDRTRSRKPIWVTFIDVAKAFDSVSHQSMLIAARRVGVPDIVLGYVSSLYRDTVTRLKVGKTLGERIHVLRGVRQGDPLSPLLFNYVMDWILDELDPSLGISLGAGREMSLNHLAFADDVSLLAGTRRGALHLAGQFERGLGKVGLSPNAKKSATLAVVVDGKAKRWYVDHTSFLRLNGQVIPSMQITEVYKYLGTSAGIRVEQPAVKARLEKGIEHLSRAPLKPQQRMFILRVHLLPSLYHQLVLDRVTDGMLGWLDRIVRKAVRGWLRLPHDVPTGIFHSRIADGGLGLPMLVTKMRVLRKNRIAGLFRRASEGSDPVLKWYSENSATLGAEKDRWATVKYKTEVVTTTRQVDDKLARELYQTIDGGGLSQHSKVPYIHSWVGDGSRLLSGKRYIGAIQVRCNTLYTRGRAGRGRQNRDVRCETCGDYESLGHVLQTCARTWNHRNKRHDYVVDKVCE

SEQ ID NO: 881 - protein, 1211 aa, synthetic construct
MVAKLISTRMPNKERSRDPPASGSVVLPADKSVESAPATGRQTRTAKSGSAVQLTCGNPPAGNERTKSNAASTSNPPSTDGGAVRFPSTQHREHEMDVVNVPFVCEGNTTHRCIQGQCVEEFLEFKLLAKHLQQAHRWSSTRIEAIQFVCRLCQAPWPKLASATSHHRYCKMAMGKAHAGGHGRPVRDNTVTASDFACAVDGCKFFAKNAAGLKVHKARLHPTVRNAELAMPTGRSLPWEAEEIRLLAMHELSENSARGWIGRFVSSRKLNRTTDAIRSFIRTNAYREVRDLLREEGTGPTRALAPEVNTPEVAPSEPPISVESTRSISRSRLLEQLRNLLDEEEVSECVRVYTRTAITRKDPGCGFESMLGKLIPVAETARRVTQPTQSPLPKNRKERKKAEYRSLQRLWKQDRAQLAQVVLDDMPTNVQEPPLNLVEEAFVDRFEKTSPEDVEPFEPNACDDPQGLVDFIGVTEVRLHQKKLKLRSAPGLDTWITAERLKAVSACDLAALFNTWLYLESVPQPLKAARTKLLPKSKENLGDIGQWRPITIGSQLLRLYCKILASRLQKRAHVHPMQSACQPHDGVGYNTNLLNEIMRDARTRRKSVFIVWLDIAKCFDNISHKTIERALSRFGTPQHFKNVLSDLYAGASTVIRTAHGETRPISIRSGVKQGCPLSPILFNMIVDELFRKLGSDWGYELGDHKVAAVGFADDTILVSGSQMGASKLLDETCRFFGARHLNINPKKSLGFGMVHPPKAKGKTMKILTGSLWNVAGTPIPMMGVEESTRYLGVQFGARGRKNADLTELRVWLERVKRSNLRVAQKFYLIKTNVLPRVRWRLVNGNANKMTVRRADALVREMVKQLLHLPVGTADDFLTLRVTDGGLGLSRLADSVTKGKLKLAYRLQSADDPIFRSVAERNLSSHDTRRCLRDFQLGAIDRPSDINKAAERQYMDRKEAFGNTSQGRCHQHLANNGNPWLHFDRGSLRANDFIDACKLLTEQLPTRSVVCRKAPELDQRCRGCLKEKETQKHVLQCCPITKHATMSRHNRIADYIANMVVEHGRGFRVLREPGIRKKISLTEEKLHKPDLVCISEDDEPGESKIVVIDVAVRYEDAPHVMDMVAEEKHRKYVGLTETLRTLFERPHAEVIIGSIVVGVKGALWLGNQRFLNHLFGAERKMINAEISRLAVLGSVKVWHAFIEETIGRWKRK

SEQ ID NO: 882 - protein, 1130 aa, synthetic construct
MDGRKGLTRPLFQLVLDEILQTAAVQKTPEGAISEPGPSKPLPRANVLNTNLNMMSSNNENVPEAAAEGRYSGVAVGAATVGTSTVTPCVRCPEFNQLCKSQRGLALHRRRAHGKVPAPQALTKRRWTDTELYQLALEEIRLRDNLPAGLGLNQALQQKFPNRTVGSIKAQRRTALPRYQQALQDAERFMARRQGAPSVLSLEQVSRESEGMGIDLPEVSTELTAGDSAVGGETSQSVEAEPANVQLGEDPERRAWRSRLEESISASGIHLPGQCVEAILDPQKSKAEVRELVSAAYDAWIPARESRPRAAPGTRSNRGIGRPKPTKRALRRQNFARLQRLFKRSRKRAAAAVLDNSWESLADDLPGVSLTDQEEFWKPLFEAPSQPDPRQPDCHEVNWDLAKPVSSEEVRRVIYGPKGMKDGAPGPDGLKLRDLKRFETDKIAVHFNLWMLAGSPPDRLSEAVTILIPKELGATEPAKHRPITISSIVLRCFHSVMARRMTDGLPWAPCQRAFVPGDGVAESTLLIQQILSRARKKLKATHLAFVDIRKAFDSVSHETMLKAARRMGVPDPFLEYLGAYYERATTRLKVRGTLGVLIRLGRGVRQGCPLSGLLFNAVVDWVLSNLDPNLGMPLEAGPVGDDTRRIRCIGAAFADDLTLCGETKEGLQAQCDNLTAQFRAAGLEISAGPNGKTTSLSIEVDGKAKRWSCVSEPWLQVNGDVVPTIPLDGVQKYLGIQFSAYGCRVDVVKELEEGLENIRKAPLCPQQKLYVLTQHLIASLSHQLVLAPASAKYLEHLDRLVRKAVRGWLRMPKDTPLEAFYARTMDGGIGIPLLAKRIPILRSKRFTKMSESQTKDPVFAFLLRGYQPPPPPKFNGVAVADMRTLNEAVAENLTDRVDGRGLRPAPYVKAQHDWVNSATELVKGRSFISCLKLRLGVVSTPERNSRGRPEMDSRCDCCGRTCGVSHILQSCPRTDGSRRARHDRLKGRLAHAARKRGWTVLSEQTIPVPDAHSKRPDLILAKNGHPVYVVDVTVVSDRWEDLESAYRHKCNYYNTEVVRSFVSSRFPGAQVKHQAVAMSWRGLIHPESARLCCEALGLSKRWLSIFSLVVLEKGTSILVHWSRSTYRVTH

SEQ ID NO: 883 - protein, 958 aa, synthetic construct
MRQIHADEYNSLQLSRPRPSRMKWTLLEDAQVQIIANELWPQCATRKQLYQEVSKSIPKSTQESVRQRLLHLKWVPLSKDTEEVQPVPISCDATPISPPHPIAAPISLSSPRHSQTSGQISSVSDVMEYDDGKAALRSSALRQIESSKSTTPGRHELHVIIEQLISQPTHSSNVKAQIDEFIQRQFPHTWQPSKRRSHGQVPSMTKKQVRRAQYAQIQTLYHHRPKDAARCVLDGKWRTAFSAHAEEMPGFNDYWSGIITAPRVVDTRVSREVIPTNTDLINPISDDEVTRALNDMKGTSAGLDRLTAISLLKFGSSYWAALFNTLLSLAYLPPHLSASRLTFVPKCDDPSEPSHYRPIAVTSMITRALHKILAGRWSRLFPHDRLQFGFLQRDGAFEATSLLHAILRHAHSSSDPLAFAVLDLTKAFDNISHDSIIRSAQAFGAPPTLTSYLRSCYSSSMVCLNDRFLHPERGVRQGDPLSPLLFIMSLDEALASLPRCGINAAGTAIQTCAYADDLLLFAPSKDELLVTLEHLADNLELAGLSINSGKSKIGNILASKHPYFVALDQDPLAFRGEVIPPLLPSEEFKYLGVPFNWKGKAIQKLQEELVQMLQEISAAPLKPFQRMDLLRRFLLPRLTHSLTLGTVHKKTLRAMDRKVRASIRRWLRLPADTPVAFFHADINDGGLGVQNLSVSTILNRRLRLERFLSSSIPELHWAVRDPASLPSLKLANEQARVGEIAVESIAEAKSAWRTILLQSHDGAGLVDATRSPVSSWWLRNPGRIFPRLYIRGIQLRAGILNTKVRRSRGGRAADNVNCRGNCGHHESLPHILQRCSVTHDARCSRHNEVCRLVQTKLPTQKLTVLDEPRIPLNTTYCKPDLMLIKKNVATVIGVQICGEAQMETSFKRKISKYSQPTIQNAIESFNHISNPTLQSVFHVPIILNLRGIMHPKSAAFLN

SEQ ID NO: 884 - protein, 1246 aa, synthetic construct
MRSKPTLTGNSTLMMIQNTDNAPCLFSGDHQRFEVAARGVSCTTPVSAAVTNRRRVRMSPDVVSIVSPNMKRQRPAHIVDLDDVSLERELNTEEEETRKEAAGSLAAEGVSPKEAQAIVDNEQLVALASQSARNERPVDVHVCFCGAAFRSARGLGQHNRHRHPLELNETRKKLLPFRKRVWEKYEDSALIRLANEIAQSNTTKRDLSYQLTAHFLGRSAEAILSRLKVLKWSNDRKQPSSIRRNLMQPGEVHSLVQSEHDTETHGPPQQPPVQIQSPVDVPPTSTVTGSQEVSCNGASRSEAFQQLSREQVSSCPSIEPAIFNAICESSTVLDWPTRGPRGDGADNEIITDHALGSAISSWPHNISTPTHSDREPEYSNWFDSFIAGVASRLREIIEDQKPQSIEPLRGQELLTVAENLLSGSLSLKRARKQLSKHASICFPHLWKPTDKSKYLRSKTLTSNRAIKRANYAAVQALYAMNRKDAAKMVLKGDWKEAYKGRGAEPRGCHAYWSEVFRSPGVRDCRPVHKISSTLWSLMEPLTTAEVTNTLASMGDKAAGLDRITLAKVKGFSRMLLTEYLNLLLVTEAAPVQLTKARITMVPKIAKPSEPADLRPIAVSSVLHRLLNKALSCRWSKSLNFNSYQVGFQPRDGCFEATLLLQTIIRTAHQTNTSLASAFVDVSKAFDTVSYDTVLRAAAAYGAPSPLVNYLRSQQNSSFVTLDGRKEVRCKRGVRQGDPLSPILFVMAMEEVLSASKPEIRFEKKDLKVHALAYADDLVVFAGNETELREKLVELERALAMAGMQINVKKSRGLTIKANKKLKHSVLMDTEYKLLNDNIPPVGTADTLKYLGLSFNWKGRVPVKHTGKLDSILTEVSQAPLKPQQRVEILRDFVVPKLLYELVLGDAHRNTLKRMDIMIRTRLRAWLRFPKDAAIAYFYVPTSEGGLGIMRLGTSVPLMAKQRLQKMLNVDNNITSVLRGTGEFRMQLRHAGRPIRVESEIVTTKVESHKAELSCLKRKLDGRDLAVPDVDPVSHLWVRYPQNVFPRLYIRSLQLRAGVLRTKVRGSRGRVQVPGTMMNCRGGCGQPESLTHILQRCQVTHDGRCARHNRVAEAVAKKAKASVEETWVEPIIPVPGSFRKPDLVFRQGNVLRVMDCAITTGERLEVMWREKVDKYSTEDCKTGIQQTLGSNYQVVHCPIILSYRGLIYRKSAAALRQLGLTSWDISDLCLLAIRGSLKEYDVYMRGT

SEQ ID NO: 885 - protein, 1073 aa, synthetic construct
MAKREAQLMKAGAVNFNFELTRLMAGRTLESVKGQRRSEAYRGLVREYASLESSSDEVPLRMGCRVDSGAVAERLPSPVPRGFIPSTSALAGLPGLVPDTNGGEAPLRMGCHVDSGEATERLPTPVPRGFIPSTSALTSGVTPHPEEADTIATCATEEEDVWERLTSAVEQAGPSYHLNGAEFRTFLDLCCSRKEGNLGHCQALQDLIDQEYNSWVSDKYRSVPVGSRSKSWGKKIHSKTVSEEHSTAATAQSGRTSGAGVRDRRPPGRSSRVRARRYRRVQCLYGKNRSECGREVLSGNWREERAGLKLHQQQQFWSELFSAQSVHDDRSSETVFRREFSLMAPFSRFEIEKSVSGQGSGSPGIDGITRETLKSADAGDLAGHCNLWLLAGCPPSGFRQGYTVLVPKVARPQVAADHRPITISSILARAFHRCVAGRFEKTLPLGIRQKAFRTGDGLRDNVWTLRGILRERTRRCRSLCVAFIDVAKAFDSVSHESIVQSAIRIGVPAPLADYVRSLYAGGKTQLKIDNELGPAIAVGRGVRQGDPLSPLLFNFVMDRALSKLDPRLGVRLSDDVTINHLAFADDVVLLAETAGGLRELARLFEAELALVGLRPNPKKSATLQILVDGKRKKWVNGTRTILKLGDDPVAALTVEEAYRYLGTSVTLGIKRQVSSEVRLEQGLTQLSKAPLKPQQRMFILRTQLIPSLYHELSLGDRVTYGVLGRLDRSVRRAVRGWLRLPHDTPTSLFYASEVDGGLSLEELRVTVPILRRNRLDRLIGLADSSADPVIRWLVNSTSTLTKDRKRWDTVQTRGVTVGDAKQARIANGVALHDTVDGRGLRNMPDVPCVARWRTDGSSLLTGRNFIGAVQLTSATLTTRLRASRGRPDASTSCDCCGRVESLGHILQVCERTHGPRIARHNRLVELVSSKAAKLGWTVVHEPHIRTPAGIRIPDLVVYKSGESASVLDVSVVSDTADLHAEHEHKVSKYDLPEIRSYVANLSGVPTAEVGFSSVCLTWRGSLGRPSSCFLTQLGIDQRSQMLLSVRCVEEGFQIYLSFQRSTFRPALARRRVP

SEQ ID NO: 886 - protein, 1157 aa, synthetic construct
MSGNQGSASNGSPVKGFPCPDCTLVAKSKGALASHRRWKHPVPPSVSSDELEGAVGGVPVLTPQTDGQNQGQNPVSGASGLVIGSTATGTVKGFACPNCPRSFDKSSGLSLHRRKAHASIFHAEFVPPVLTKARWCTTELTLVAREEIRLSRIAGKRATVAAIAACFPDRTFDSLKSLRRNPEYQRILSEVEERLIDDPCRTGPEDGSSQSLVSPPNVTTQARESDVGVRTPGPLSPATMTNSLADSLLSGEGASVCSAPCEQMNTLLIVLKANRQKFHLDDHSMDSLASDLATGLRSSNPALLQSLIDTEYDGWLTYLDKTYGPFKKPTLSKPGGRWIPPKIDSNCRSSKKLERRRQYREVQRLFKKNRSRCADLVLSGDWSKEPVEIPFEEQESFWGPLFETQSLPDRRRPDPISPPILELVDPISATEYSDSLKSLKDGSPGVDGMDRAYLRGIDAEDCIAHFQLWLATRTPPLAFKAGITSLIPKSADSNSPGQFRPITVSAIISRLFHRILASRLESLVPLSPRQKAFRRGDGLQDNVMILRSLIKDRCNKNRPVSLAFIDVAKAFDSVSHESLILAAERVGVPSILLDYCRNLYCGGTTSLKYGRSQSSRVISARRGVRQGDPLSPILFNFLMDWVLSALDDNLGLAINDNTRVCHLAFADDLVLLSESVDGLRTLARDFEIGLSNVGLLPNAKKSATMRILVSGKRKKWVIDPKPFLSLGGVEVPTIGIDGYYKYLGLSMTAGKPHARASDRLLDHLSQLDRAPLKPQQRMYFLKVHVLPGLNHLLVLDPVTVSQLQRLDIAVRRHVRKWLRLPHDSPNSFIHASVSDGGLGVSSLRTNIPLLKRDRIDRLISRVSTGLDPVLEAVYKTSRFLNDEIRRWSQPRSFTGRLIATKEDARNVQASSLHTSVDGRGLRFHNLVPSSNDWLTNTTSVQSGNSFIHCVQMRAASLHCAVRAARGRPGASMKCDACGELEGLSHIVQRCCRTARPRDGRHDSVVQFLAKKLLGPCEVLVEPTIPTPSGIKRPDLVVFVPGQWAKVIDVSIVSDDIHPDIAHQRKADYYSREPAVVAWVAFRTDCLVSSIDFAGAIWNWRGALSPASATVLADIGIRKSDLNILTIRVLEQGFKCWRTFKDCTWLGGRRRRRRALSG

SEQ ID NO: 887 - protein, 1125 aa, synthetic construct
MNNHQKTCQKQRALTQQAVQIPLAVLPTAQSQPAIQEFICDQMYCAKSFPTKMGLTQHTRLMHFAVYNDALPDPTANRQVWTTQDLEKLARLRANLVPGIGPTDQARLLYPSFPGKSAEQIRAVMYTKQFRDITLDPDPTTPAIDRLEPIRPLPDQTAHSQSENTRRVDPGASTLRQVRVETVERRREESPQCPTAQSQAGSTCRVDPGASLSRIEQLALPAAIPAREPVRELVVDFGLVNSPTIVDKDPATVIRELLQELITIDHAHPLIAAANRYTRRALESNDTNTGFDEFIDAIFPPKVDFEPKLLPPTRPPPTNNHQRRIAEYKRCSRLFKKNPKRLVNQLIDGAPVTYTLPLRADVERVYLERFSVSRPDETPAEPTKQCADPDGQVSPIDIDEIRREIKTTRRNTASGPDGQVNAKRLRLIPLAVFHRIFNLWLLMQSVPQSIKPCRTTLIPKTADNLDDVNNWRPITIGSILNRLYAKVLDQRIKPDMHWTQKGFMPVDGCGEHISVLTALINQSRKNKTPLCLVFLDLAKAFDTVPHDAIRRALIRHSVHPMMAAVISDLYDNAATLIACREGNTREIPIKRGVKQGCPLSPKLFNMVMDELLSSLPDQYGVEFAGEKICNLAFADDIVLISPSVPNMARMLGLVNTFGEAHGLQLNPRKCQALRLAPVEKNKKIKIMSDTIPQWSVNNVDIPMIKADGIVKYLGAHLSPRGSMRLQVSEITDWLEKVSKARLKPQQKLILLRSYLLPRLIYRLTVSSETSSNKAHELDRKVRKTVRKFLHLPSNLHLSFFHLPVTMGGLGIPALVDVVPLQKMKFINRNIASASDATRAAIAHEFWEKQKRKIMRWLHIPLWLNQKEVKTHRLSQHHERLAALINSTQGYGYEQIGTNPHKNDWLHGYKYLRPDDFINACKLMSCTLPTRVNLYRGQPNANKQCRRCHQKPETQNHVLATCPPMARAITARHNWVCGQLAKELRANDYQVIEEPLIQIPSGDRLKPDLVVVKDNHIDIVDVQIPYENRTDNVSTSYEYKMHKYEPLLETAKLKYGAQSARVRPVIIGARGTWCARQDSTFLSWSMTSKFRRKLSLGALIGTLRVWKLFLSGLDTRPRYTNIEKVI

SEQ ID NO: 888 - protein, 1053 aa, synthetic construct
MFPCVCGTNFADERGLETHLRRDRCRGPPTENDRVCPECGRRFDTFAGMRQHHRKAHRDQHDRQLELRYEGEAGPAREWSEEDTLRMARAEAAFTGKHINQHLQGIFPGRTVDALKYRRRKQEYKDLVEQLKNEVNQAQPGEAPLLVDPGDPPELNPFPPQQDGDPIPPDRGLHMAQNMNIIHPIWEANDPLAIAIRDFLNSAQNLTEEDLALATLLDVRDLRRGDARIAETIETYLTHIKNSCTPIGRRNRPNNIRTRTAPMRNENPNRTGRRVGQYKTYQNMFREDRARLAEVILDGVTLEEADKFPDITEVETSYRDIFDRVGPDDDAPFEAVDHRVRLDSIFTAEEVDLAFNTNKSDAAGPDGIKPSWLKKLPRHKLICLFNIILLTGYVPPEWKLNRTILIPKAGDPVEVGNWRPITISSALQRIMNKILAKRMALLPLHQNQRGFRRFDGVLANTLTLQAIIKECRAKLKPHSVLTLDLRKAFDTVSHASILRSMRRFCVSERLILLVEEGYRDTCTTVSVGGNTTGPIRVRRGVRQGDPLSPILFNLVLDELIHSLENLGSGVRMGTGTSVSCLGYADDMLILSNSIRGAQNLLGEAADFFSARGMALNHDKCTASTTSINRGNKHIYAVSRSAFSVEGVPIRQMVPSDQYKYLGRRYDLLGQTKPTLDELDGQINNIIRSPLKPQQKLVIIKSYLIPRYLDKLQSPVVTLKLLKTFDRKLRVATRRILRLNRTSQDAFLHAPVREGGVGLLCLRDYIPLILKNRMWRLGDGRDQLQTEIMNVDWIRSLSERILRWCGEKTSGSRIKIAWSDALQNGYSGNGLQQGRCHIGSGSWINRPPPFWSGADFSRAMQLRGNLLPTKGIPSNPPEERKCRAGCQRVETLCHVLQKCPMAHFCRVRRHDHLVDCLAKNLQKKGFEVETEPRIRSQDGRLRKPDIVCAKGDRVLVVELGVSWEGPDPLSVAWHNKRALYEDPGFLAALSLRYPGKLVSVTPVIVGARGTWCASNRLFVEATGYTKQEVAQVCERTLLGGIIIHRNFMKQMGPH

SEQ ID NO: 889 - protein, 1129 aa, synthetic construct
MRAKISRATQLRGLPSLETMGIMIGVNNEGISVNGSASNSNRMTAEAPDQEVGANTNQGGAGGNDFVCDVEDCTRSFGSQRGLSQHKRLAHPVQYNASINISRKKNVWSNEETRMMAMDEARATLKEENKRLFMNQYLINIYPNRSIESIKGKRKSPVYKELVMECINEIRSETGNSTSGGSAEVSRNHLDRGIGSTDLRMAYEEDRRPGSLSETNASDIVSSGRENAGHVRLQVAANSGPAVPEQPDDQPRGEESEESVDELVMGRNNSSRIIKDAINELIRTLDTTRKTMNRKLIETVEKVLNGTDNGNSLTNWIMKWLAARPSKRVSMREKEPSRAISRKERLRMEYAHLQKLMKKNFRTAARLVLTGTKPMQCTLPAQEVRDFWKSVFEVDASEEQRNNETRPVWKRNGKLSSLWTPVTTQEIRNAELDFNSASGPDRVTVAAWRAVDVDARALIMNVFLLKQDLEQRLKNARTVLIPKVDQPTSPGELRPISITSVVVRQLHKILAKRFNKIYNFDERQRAFINCDGTLENLMLLSAILTDARRRKKELHIASLDLRKAFDSVPHHVIIDTITALGCPKPYITYVERLYQGAKTLLQYDNKGYTLSIERGVLQGDPMSPLLFNAVMDRALQGVPDEIGYELNGKRLNCLCYADDVIFIASTKLGLQRTLNIVAHKFGKLGLEVNIRKSNTLSMIPSGKQKLLKTITEPSFSINGGFLDAIGVLDVWKYLGVRFVGSKVEGAKVSCAQELKNITRARLKPQQRLRILKSALIPKYLHALVLGRVGWKQLDELDKQFRDATRGWLKMPKDVPLAYFYASCGSGGLGMPNLKQMIPLIRLNRIKNLELRWGENVGFLKNSFFYKERTEWCMGALRTLGTEPSKRSAKRYWDDELLRKVDTNDLYVCKESKASNKWIQNTSDLSGQEHVFFHHVRAGCLPSRARTARGRQSDRSCRAGCRVSETNYHVIQQCHRTHGGRILRHDKVVDMLCEQLRQNRFNVLKEPKFRTEEGLRKPDLLATKDGKTTLIDVQVVSGRNMARDHAAKRSKYSSVQGLEEKIKTRVNSREVDYEACTITYKGAIGRDTDKLLNKLRIPEQVKYRIVKSVLRGAWLNWKRFNSLTTTRGRR

SEQ ID NO: 890 - protein, 1017 aa, synthetic construct
MKPFKCDHCEQSWTTQIGKSQHMRKAHAEQYHQSKSEQPILRRNWTAEEIHLLATDYLELEASGYPGDKPKELIRLGKSTRPYDSLRKMIQDERFRSALETARRQQRPQTPPPPPPEDPSSPSTSTSSSRRSSTSSSTSTSTSTSAPPSPPRSASPRSQPPEWSLAIKAVFSAALLASVSIDDLVPGAADLNQQYVDDDFQRWLPRLPEPKKKTWAPSPLPAGKRQRRRALYARVQQLYRKNRVRCADSVLAGTWDAEDHCLPLETQEPFWRNLFETASLPDQRLPEPVREVQWDLLKPITEAEVTSCLSSMDAKTSPGLDMYTLSKIKQLPPQQLVDRLNLWLYCSTVPSSLNEGFTSLIPKVPAPAEPALHRPITVSSILSRLYNKLLSRRFDRLCPAGVRQKAFRQGDGIAENTEILKNVIKTAKSKTRNVWIAFLDVRKAFDSVSHESLILAATRAGCPSPLLEYIKTIYANGRTRLKVGGKLSEPISVAQGVKQGDPLSCILFNLVVDWALDALDSNIGFKLGEQLLSHLAFADDVVLMSETQAGLQRQIDAFSGHLAKSGLLMNAAKCATLNITALPAQKSWVCNQTSSLRLGGVLIPALSVNETYKYLGLQVSATGVSPKVEEKLKEHLKQLTRAPLKPQQRLWILRIKVIPALYHQLVLGDPTRGYLKYLDNTIRHAVRRWTRLPHDLPIPAFYADPTDGGLGLDSMVLRVPTMKAKRLQNLVMSADPVVREVAKLDSFQREMRKWSRPVEFRGLLAATKPTRRAALAYHLHDSVDGRGLRHASLVPSAHEWVTSGTSLLDGHKFNAALGVRFNCLPTALRAARGRPNASSSCDCCGPGQLESLSHQLQSCPRTHGSRVKRHDRIVDQARRILSRLKYEVIVEPHIQTSDGLRKPDLVAHAPGKPTMVLDATVVSDMYDDPNEPHQGKVDKYNTEEIREKVTQLTGAEPGFSSICISWRGVFAPASAADLRDMGFTQADLGLLSAITVEQGATVHRIFYQSTMRTGRPL

SEQ ID NO: 891 - protein, 1234 aa, synthetic construct
MVQSMALRYISTATQTDPLDLRVKKADIPSTPQESSDEGFNLVCLEFVNTSYRREVGFHLETIWEGLAELPEPYEILPLGLAQEDESECVQRVIEEPITPEALLRPSEDRTPPRTPVVSVPGKNPACPRCATRFTRLLGLIDPLKRNHGQKKIWFKCSKCGKQNLKYHSIACHFPRCKGEVCVAPTGDWVCEVCQRGFTTKIGLGQHKRLMHPLVRNLERIEASHPKVSSLRGAHKKVWTEEEEALLRQLVVTYAGRKNINQLIMEHIPSKTAKQISDKRRLLMKVPSKKVPSIEEGGEEGKEDLPQDAGRTKEGQLKLHYYDAIKERLAVYGFASCQEAFEKILEGQDPQMVVNEVYGKFFGSPSGPSVFGTSTRGRKAQRPQGQKASKVTTSWMRKRAEKKGKYLRFQKLFHLHRGRLARIILDNSEAVQCQIPSGIVHAAFKAKWETSVDFMGLESFPPHGEADNTVFRALITEREIGKNVNEMGKTSAPGPDGITLGHLIKKDPKFSLLMEIFNLWLVAGTIPDLLRDCRTVLIPKSSDLGRLGDINNWRPITIASTALWTFSRIVRPRLTRACPINPRQRGFIRASGCSENLKLLQLIVRHAKRERCELGVVFVDIAKAFDTVSHQHILTGLTQRGVDPHVIHLVIELYKNVSTYIGIKSEKTDPINILSGVKQGDPMSPILFNLALDPLLCKLEKNGYGFQRGNLKITAMAFADDLVLLSDSWDGMCGNIRILETFCELTGLKTQGEKCHGFYIKPTRDSYTINDCPAWTINGSPLNMIDPGNSEKYLGIRIDPWTGFADSGLAEKLEEWLHRIGDAPLKPLQKVDILRTYTISRLVYQADHTELRSGPLESLDLNIRNAVKGWLHLPPSTCDAIMYSSCKDGGLGIIKLSVLVPSIQARRLHRLAQSSDEALVTFLKGEHLEILYEKLWIRAGGEKESIPAIWEPIPVEECVASGGEGVSEWEAPVPKVRYPRPCNWRRVEFDKWKHLVAQGHGIENFENDNISNGWLIRYRGIPHRKLITALQLRANVYPTREFLARGRKDDCVRSCRHCAADYETTAHIIGNCPITQEARIKRHNSICEILSGEAKKVDWTVFQEPHIRDEYNELFKPDLIFVKGSKAFVVDVTVRFEHSSSSLKDAAAEKAKKYQCLLPQIKDLTNAAEVEFVGFPIGARGKWYAKNSELLSALGLSKTRLGKTARALASRALFASVDIVHIFVSKARSIVPPE

SEQ ID NO: 892 - protein, 1264 aa, synthetic construct
MVLTIPSNYCDEMGRPLRVNYISVATQTSPLDLRDPVAGRATVCRGGAVEEGMNLSGLEFTNSRLYGFEGIDSSTWQERLSRLPEVYESLTSLRVGGVSDSPPRIEESEGEGEASPPGALAQPTLLTSPPILGTYPDLPTEGTPVVKVPDKNPSCPCCGNRIGKMSGLIEHLKRVHGKKNALFQCAKCGKTNVKHHSIACHYPKCKGVETSPPVGGWACEECGRTFETKIGLGQHKRSAHPAVRNIERIAASRPKECSARGVHRQCWTEEEVELLRRLDKQYEGSKNINKLIAEHIPSKSAKQISDKRRGLHKSPVKRREKDQEKQKYLESEGLHLPGIESRVDGGLRSHYRKVISDWVTSDKLTVLRGMFEEVIEGEKDLSTLVDEATQDRCACLFFKSHELKAVQGGRPKVTRRVPSSEPPKVWMKKRAKKRGHFLRFQRLFYLDRGKLAGIILDNVESLRCGIPLDEVHAVFKSRWEMSGTFKGLGAFVTEGQADNSAFQAMITAKEISKNINEMNKNAAPGPDGLSLRDLIKTDPHYTQLMELFNLWLATGVIPDVVKECRTVLISKSALPERQKDINNWRPITIGSIILRLFSRILTVRLSKACPINTRQRGFIKSSGCAENLKLLQLLIRSAKREHRPLGVVFVDLAKAFDTVSHEHIIMALRQKGVDDHIVSLITNMYLNVNTRIHLKNDQTDPIRICIGVKQGDPMSPILFNLSIDPLLCKLESEGSGFQHYAKKVTSMAFADDLVLLSGSWEGMKDNITILEAFCELTGLKTQGEKCHGFFIQPTKDSYTINDCPHWTINGTPINMIEPGSSEKYLGVRVDPWIGISKPELLEKLQGWLHQIHSSPLKPMQKVDILKGYMLPRLFYLADQTDVKATYLETLDLAIRSAVKEWLHLPPSTCDALLYSSTKDGGLGITRLLGLIPSVQVRRLHRIAQSSDEITREVARNEGIEKEFQKLWVTAGGDKNKIPSIWDPKTVMVISKELGGEEPASEWEVPAPKTIFPRPCDWRRQEFINWTKLLSQGRGISNFEKDKISNNWIEHYRGIPHRKIITALQLRANVYPTREFLARGRKDQQSTSCRHCGADNETCAHIIGYCPAVQDARIKRRNYLGELLISEAKKEWVVFQEPLLRDNNNELYKPDLVFVKGDQALVVDITVRYESKPTSLADAAAEKVKKYQHLLNQVQELTNATRIKFMGFPLGARGKWHQGNYELLADLGLSSSRREKVARRLSNRALLTSVDIIHIFASKSRTVTS

SEQ ID NO: 893 - protein, 1270 aa, synthetic construct
MSRSVYPHPKLVKMGRPMRIAFVSVATQTGPMDLREKVTTELGKEHDKDDVPENSWNWDGLEFINSIADGLEWSHPSNWAERLAMFPEVYETYNSLCAAEKENDRTGELTSQMAMSPPRTPSPDPNADLPNRGTPVVKVPDKNTSCPCCGNRIGKISQLVEHLKRVHGNKKILFQCAKCGRTEMKHHSIACHFPKCKGSVTTDPECKGSITTDPTVGFTCEECGRVFTSKIGLGQHKRLAHPVLRNIERIAAAHPKASTKRGLHRQCWTEEEVELLRILDKQYEGCKNINKLIAEHIPSKTTKQISDKRRGLGKSPEEEREKDQDLEWRKLMTKEQEHPRGTGSSTEEGPMSQYKNRIMEWITSEKLPILQGVFEKVLNGEENIDCLIEEAVDEYYPHLFRRSAELETSQDQKRPRPSKANPPGPSTEWMKKRAKKRGQFLRFQRLFYRDRGKLAGIILDDVESLQCGIPLEEVHEVFKSRWETPGTFKGLGAFRSAGQADNSAFKAMITAKEIAKNIREMNKKAAPGPDGLSLRDLIKIDPHYTQVMELFNLWLLSGNIPDVARECRTVLISKSALPERQKDINNWRPITIGSTALRLFSRILTARLTKACPINPRQRGFIKSPGCAENLKLLQLLIRSAKKEHRPLGVVFVDLAKAFDTVSHSHILTVLKQKGVDEHIIKLIKNLYHNINTRIDLKNKQSEPIGMQIGVKQGDPMSPILFNLSVDPLLCKLEEEGSGVQYGSKNITTMAFADDLVLLSESWEGMKKNIEILEVFCELTGLKTQGEKCHGFFIQPTKDSYTINNCPPWTVNGTPLNMIEPGSSEKYLGLRIDPWTGISKPELLQKVKGWLQRINDAALKPFQKVDILKGYTIPRLIYLADQADVKTTYLETLDLEIRTAVKEWLHLPSCTCDAILYSSTRDGGLGITRLTGLIPSVQARRLHRIAQSSDETTREIAKKEGIEKEYARLWIAAGGNKEKIPPIWDPTTVRVISEGQGGEKQVSEWELPAPKTIFPKPCDWRNQEFTNWTKLISQGRGISNFESDKISNSWLEFHRGIPHRKLLTALQLRANVYPTREFLTRGQQGTLMRACRHCQAEAETCAHIIGYCPAVQDARIKRHNQICEMLMEEAKKKEWTVFQEPHIHDEHNELYKPDLVFVKENQAIVVDVTIRYESKSTSMADAAAEKVRKYQHLTDHIQDLTKASNIKFMGFPLGARGKWHPGNYELLKEPGLSSSRQDKVARRLSNRALFSSVDIIHIFASKTRTITRSA

SEQ ID NO: 894 - protein, 1039 aa, synthetic construct
MDHNNIKKGRQEGSCSPAGAISFSSGLLSQYPCKYCTKLFSSRQALNGHLRVHAELRRFLEPPSELVSTSGRMKWSAEETAYCVRAYRMLSHEECVPTEVHKKLLEWGYSRSYESVRKFLRTKKFADELERSTKTTVTHVVAEEVVSHDDNSAVNGASDLEGVLPTLRSLMESQVDKVGQLEQQINVVVESILAGETSKESLSELTSNLLENWAAKFAPKRKIRKLNKNLESCQKKMSSRARKAMMYKFDRQAWNKDRSRTANRILNGPVQGCKRPDEIPEFLPYWSKTFEKFESSGVNAVNMTLIRDSYQIWSGISLGEVKVAVSGMKSRTASGPDGISCEELKAQHPRVLCKLVNTFIYLGGVPSILKRSRVTFIPKKDNASSPRDYRPISVTSVILRLFNKILAKRVIDSAQFDHRQRAFRPVDGCAENVMAIEGVLNDARKMHRSVYMASLDMSNAYSSVSHEALLKALESNGACRGLLGYIEDLYSGFTTLLSDGGKEQSVQVERGVMQGDPSSPVLFNMVIDQLLNHIPEEGGYQIAEGVRMNGCAFADDLNIIAATPPGLRMALTEIEVNGRPWGLEFNEKKCSYLAVRAIRGKETVVETDHVFNINNKPIPATEATDIWKYLGAYFSADGLQDAPDMLSVWLERLKGAKFLKPQEKIYVLRVHIIPRLIHRLRMSNLSASKLNSMDRKIRAAINGTQGFAHLSSRTPIHFYYAPGKSGGLGLMRLRHSVPAMVLGRFGALKDSQDNVLKTIANLSANVLRCKKAESLLVQFGDVRSSGVELLVGRSRGQISEINRFSLVESTVSGRGLKHAGEVPQVHSWVTNGSTAFFTGREYCDALSLRLDALHCRVRACRINRTSNFTCRAGCPEAENNYHQIQRCIRSHGMRMRRHKTIVDALVKKLLQMGFEVRKEECFKTSEGNRFPDVVAVKNGKVFVIDPSIVGDTLDPNVWHDAKKNKYETCLKDILQAQYPDHDIFFGGLAITYKGVLASKSAQYLREVGLSNGFLKLVTMMTIRGSLLCHWATQASTIVK

SEQ ID NO: 895 - protein, 1048 aa, synthetic construct
MLEIYEQEKEGGRGIGPRLLKKWRNKYKDDNYDGKKLLCQVKKLTEREWLKPVKPQERRKEKRNKYRPPDPKGRTEDANDYEQKVMTWIEREPNPKEVVKRRKTVPYWIVNPAIEILGREIKSGKLDTLEKALDRLAHLRTLADDLANKEDKATKRTNDKRGYRNIIRDLYVKLTLVKKLHTKLVHERIEIELRKLFKLGSKKELTKKWKDTKILEIRNLITQTKKKAKNLKLFAKTSKIDPNKVVQKQNKTANPQELLKKSTEFWTEIWGKPQDSTSREIKQVLKPVGEIATGRPLKGIWKDFGEEEILKATKKKKNFSAPGPDGISNYWLKEAKHKLTPLIAKELDKWANEKPLNLTRYTEGRTVLIIKDNKQSPEDPGNYRPITCLNTIYKWITSILLARLNEECERRGIIDPNQRGAKKGTWGTVVNNRIDREVTKKYKKSIYQMWIDFKKAFDSISHKYLWKCIKKSIGKSTRRLWMNIVRNWKTKLEIDGEKSEFILFKRGIYQGDSLCPALFVLCLNPLSIMLSRSKGVQLDDGKVTHSLYIDDLKLYEMEYETIREQYRLTKKTGKIIGLVPNPAKCGICGPIKYKSVDHDVIPRVTTENNYKYLGIREDDGILIKETIVAAAKKFQTELTRIWRSKASSWNKVNATNVKANALVKYIMFNVDISWDLIERWATTQRVIIRAAAEIEKTTTNVAMHGPRCKGYLGIEDLECLYIKAKMAVVLHLAKNTTENKKHAIYDSIEKEARKALTKINVKLENGTLTYGGEGYPLVIKDKCKELLANAFWNKWTSERKEQKWTGKFDNKVGYKNLYWPMNRNLSQPLINDIIEMREDNKPHKANLLRRKLALDKFCRHCGYENENQEHIAVGCTKYLKYYTRRHNKVVKKIAYEIIVKGGSIKDYIGLNANNVQVRGRYKAGKGEILLEPVYWLEEENKYQKPDLIWVDHENKCVSILEVGITWDSRIGEKKREKANKYETILPILRKQYRGYKIKNEPIIIGALGTISDDLKEWLETKLKTEIVAKKLQLEVIRSTLEITKNFLN

SEQ ID NO: 896 - RNA, 4247 nt, synthetic construct
  source 1..4247: mol_type = other RNA; note = RNA template
gggagaatggtatttactctcgaagactttgtcggtgattggcggcaaactgctgggtataatttggatcaggtgctggagcaaggcggcgtcagcagcctgttccaaaacttgggagtctcagtgacgccaattcagcggatcgttctttccggggagaacggattgaaaattgatatacacgtaattattccatacgagggcctctccggtgatcagatgggtcaaattgagaagatattcaaagttgtttatcccgtaaaactgttcatccagctggtgcagacttacaaccagctctttgaagagaaccccatcaatgcaagcggagtcgatgccaaggccattctgtcagcccggctgtcaaagagccgcagacttgagaatcttatcgctcagctgccgggtgaaaagaaaaatggactgttcgggaacctgattgctctttcacttgggctgactcccaatttcaagtctaatttcgacctggcagaggatgccaagctgcaactgtccaaggacacctatgatgacgatctcgacaacctcctggcccagatcggtgaccaatacgccgaccttttccttgctgctaagaatctttctgacgccatcctgctgtctgacattctccgcgtgaacactgaaatcaccaaggcccctctttcagcttcaatgattaagcggtatgatgagcaccaccaggacctgaccctgcttaaggcactcgtccggcagcagcttccggagaagtacaaggaaatcttctttgaccagtcaaagaatggatacgccggctacatcgacggaggtgcctcccaagaggaattttataagtttatcaaacctatccttgagaagatggacggcaccgaagagctcctcgtgaaactgaatcgggaggatctgctgcggaagcagcgcactttcgacaatgggagcattccccaccagatccatcttggggagcttcacgccatccttcggcgccaagaggacttctacccctttcttaaggacaacagggagaagattgagaaaattctcactttccgcatcccctactacgtgggacccctcgccagaggaaatagccggtttgcttggatgaccagaaagtcagaagaaactatcactccctggaacttcgaagaggtggtggacaagggagccagcgctcagtcattcatcgaacggatgactaacttcgataagaacctccccaatgagaaggtcctgccgaaacattccctgctctacgagtactttaccgtgtacaacgagctgaccaaggtgaaatatgtcaccgaagggatgaggaagcccgcattcctgtcaggcgaacaaaagaaggcaattgtggaccttctgttcaagaccaatagaaaggtgaccgtgaagcagctgaaggaggactatttcaagaaaattgaatgcttcgactctgtggagattagcggggtcgaagatcggttcaacgcaagcctgggtacctaccatgatctgcttaagatcatcaaggacaaggattttctggacaatgaggagaacgaggacatccttgaggacattgtcctgactctcactctgttcgaggaccgggaaatgatcgaggagaggcttaagacctacgcccatctgttcgacgataaagtgatgaagcaacttaaacggagaagatataccggatggggacgccttagccgcaaactcatcaacggaatccgggacaaacagagcggaaagaccattcttgatttccttaagagcgacggattcgctaatcgcaacttcatgcaacttatccatgatgattccctgacctttaaggaggacatccagaaggcccaagtgtctggacaaggtgactcactgcacgagcatatcgcaaatctggctggttcacccgctattaagaagggtattctccagaccgtgaaagtcgtggacgagctggtcaaggtgatgggtcgccataaaccagagaacattgtcatcgagatggccagggaaaaccagactacccagaagggacagaagaacagcagggagcggatgaaaagaattgaggaagggattaaggagctcgggtcacagatccttaaagagcacccggtggaaaacacccagcttcagaatgagaagctctatctgtactaccttcaaaatggacgcgatatgtatgtggaccaagagcttgatatcaacaggctctcagactacgacgtggacgccatcgtccctcagagcttcctcaaagacgactcaattgacaataaggtgctgactcgctcagacaagaaccggggaaagtcagataacgtgccctcagaggaagtcgtgaaaaagatgaagaactattggcgccagcttctgaacgcaaagctgatcactcagcggaagttcgacaatctcactaaggctgagaggggcggactgagcgaactggacaaagcaggattcattaaacggcaacttgtggagactcggcagattactaaacatgtcgcccaaatccttgactcacgcatgaataccaagtacgacgaaaacgacaaacttatccgcgaggtgaaggtgattaccctgaagtccaagctggtcagcgatttcagaaaggactttcaattctacaaagtgcgggagatcaataactatcatcatgctcatgacgcatatctgaatgccgtggtgggaaccgccctgatcaagaagtacccaaagctggaaagcgagttcgtgtacggagactacaaggtctacgacgtgcgcaagatgattgccaaatctgagcaggagatcggaaaggccaccgcaaagtacttcttctacagcaacatcatgaatttcttcaagaccgaaatcacccttgcaaacggtgagatccggaagaggccgctcatcgagactaatggggagactggcgaaatcgtgtgggacaagggcagagatttcgctaccgtgcgcaaagtgctttctatgcctcaagtgaacatcgtgaagaaaaccgaggtgcaaaccggaggcttttctaaggaatcaatcctccccaagcgcaactccgacaagctcattgcaaggaagaaggattgggaccctaagaagtacggcggattcgattcaccaactgtggcttattctgtcctggtcgtggctaaggtggaaaaaggaaagtctaagaagctcaagagcgtgaaggaactgctgggtatcaccattatggagcgcagctccttcgagaagaacccaattgactttctcgaagccaaaggttacaaggaagtcaagaaggaccttatcatcaagctcccaaagtatagcctgttcgaactggagaatgggcggaagcggatgctcgcctccgctggcgaacttcagaagggtaatgagctggctctcccctccaagtacgtgaatttcctctaccttgcaagccattacgagaagctgaaggggagccccgaggacaacgagcaaaagcaactgtttgtggagcagcataagcattatctggacgagatcattgagcagatttccgagttttctaaacgcgtcattctcgctgatgccaacctcgataaagtccttagcgcatacaataagcacagagacaaaccaattcgggagcaggctgagaatatcatccacctgttcaccctcaccaatcttggtgcccctgccgcattcaagtacttcgacaccaccatcgaccggaaacgctatacctccaccaaagaagtgctggacgccaccctcatccaccagagcatcaccggactttacgaaactcggattgacctctcacagctcggaggggatgacgaccaccatttcaaagtcattctccattacggtacgttagtcattgatggcgtcacccctaatatgatagattactttggccgtccctacgagggaattgctgtgtttgatgggaagaaaattacagtgaccggaactctttggaatgggaataagatcattgatgaaagacttataaatcctgatgggagtctcctctttagagtgacaattaatggggtaacaggatggagactctgtgagcggatcttggcttagcccaaacccaaacccaaacctttagagctaggccaacatgaggattacccatgtctgcagggcctagcaagttaaaataaggctagtccgttatcaacttggccaggactgaggattacccagtctatctgcagggccaagtaaaaaaaaaaggaagggaaaagggg

SEQ ID NO: 897 - DNA, 20 bp, synthetic construct
  source 1..20: mol_type = other DNA; note = First100bp_FP
ggtttgggtttgggtttggg

SEQ ID NO: 898 - DNA, 20 bp, synthetic construct
  source 1..20: mol_type = other DNA; note = First100bp_RP
atcctgatgggagtctcctc

SEQ ID NO: 899 - DNA, 21 bp, synthetic construct
  source 1..21: mol_type = other DNA; note = Last100bp_FP
gagactcccaagttttggaac

SEQ ID NO: 900 - DNA, 24 bp, synthetic construct
  source 1..24: mol_type = other DNA; note = Last100bp_RP
gggagaatggtatttactctcgaa

SEQ ID NO: 901 - DNA, 27 bp, synthetic construct
  source 1..27: mol_type = other DNA; note = First100bp_Taqman probe_FAM
actctgtgagcggatcttggcttagcc

SEQ ID NO: 902 - DNA, 21 bp, synthetic construct
  source 1..21: mol_type = other DNA; note = Last100bp_Taqman probe_HEX
ctggagcaaggcggcgtcagc

SEQ ID NO: 903 - RNA, 125 nt, synthetic construct
  source 1..125: mol_type = other RNA; note = VEGFA_G_to_T_change_PBS2
  modified_base 1..3: mod_base = OTHER; note = 2'O-Methyl ribonucleotide
  misc_feature 1..4: note = Phosphorothioate linkage
  modified_base 123..125: mod_base = OTHER; note = 2'O-Methyl ribonucleotide
  misc_feature 122..125: note = Phosphorothioate linkage
gattctgcaggccagatgagttttagagctagaaatagcaagttaaaataaggctagtccgttatcaacttgaaaaagtgggaccgagtcggtccaatgtgccatctggagcactcatctttttt

SEQ ID NO: 904 - RNA, 128 nt, synthetic construct
  source 1..128: mol_type = other RNA; note = VEGFA_G_to_T_change_PBS4
  modified_base 1..3: mod_base = OTHER; note = 2'O-Methyl ribonucleotide
  misc_feature 1..4: note = Phosphorothioate linkage
  modified_base 126..128: mod_base = OTHER; note = 2'O-Methyl ribonucleotide
  misc_feature 125..128: note = Phosphorothioate linkage
gatgtctgcaggccagatgagttttagagctagaaatagcaagttaaaataaggctagtccgttatcaacttgaaaaagtggcaccgagtcggtgcaatgtgccatctggagcactcatctgtttttt

SEQ ID NO: 905 - RNA, 130 nt, synthetic construct
  source 1..130: mol_type = other RNA; note = VEGFA_G_to_T_change_PBS6
  modified_base 1..3: mod_base = OTHER; note = 2'O-Methyl ribonucleotide
  misc_feature 1..4: note = Phosphorothioate linkage
  modified_base 128..130: mod_base = OTHER; note = 2'O-Methyl ribonucleotide
  misc_feature 127..130: note = Phosphorothioate linkage
gatgtctgcaggccagatgagttttagagctagaaatagcaagttaaaataaggctagtccgttatcaacttgaaaaagtggcaccgagtcggtgcaatgtgccatctggagcactcatctggctttttt

SEQ ID NO: 906 - RNA, 132 nt, synthetic construct
  source 1..132: mol_type = other RNA; note = VEGFA_G_to_T_change_PBS8
  modified_base 1..3: mod_base = OTHER; note = 2'O-Methyl ribonucleotide
  misc_feature 1..4: note = Phosphorothioate linkage
  modified_base 130..132: mod_base = OTHER; note = 2'O-Methyl ribonucleotide
  misc_feature 129..132: note = Phosphorothioate linkage
gatgtctgcaggccagatgagttttagagctagaaatagcaagttaaaataaggctagtccgttatcaacttgaaaaagtggcaccgagtcggtgcaatgtgccatctggagcactcatctggccttttttt

SEQ ID NO: 907 - RNA, 134 nt, synthetic construct
  source 1..134: mol_type = other RNA; note = VEGFA_G_to_T_change_PBS10
  modified_base 1..3: mod_base = OTHER; note = 2'O-Methyl ribonucleotide
  misc_feature 1..4: note = Phosphorothioate linkage
  modified_base 132..134: mod_base = OTHER; note = 2'O-Methyl ribonucleotide
  misc_feature 131..134: note = Phosphorothioate linkage
gatgtctgcaggccagatgagttttagagctagaaatagcaagttaaaataaggctagtccgttatcaacttgaaaaagtggcaccgagtcggtgcaatgtgccatctggagcactcatctggcctgctttttt

SEQ ID NO: 908 - RNA, 137 nt, synthetic construct
  source 1..137: mol_type = other RNA; note = VEGFA_G_to_T_change_PBS13
  modified_base 1..3: mod_base = OTHER; note = 2'O-Methyl ribonucleotide
  misc_feature 1..4: note = Phosphorothioate linkage
  modified_base 135..137: mod_base = OTHER; note = 2'O-Methyl ribonucleotide
  misc_feature 134..137: note = Phosphorothioate linkage
gatgtctgcaggccagatgagttttagagctagaaatagcaagttaaaataaggctagtccgttatcaacttgaaaaagtggcaccgagtcggtgcaatgtgccatctggagcactcatctggcctgcagatttttt

SEQ ID NO: 909 - RNA, 140 nt, synthetic construct
  source 1..140: mol_type = other RNA; note = VEGFA_G_to_T_change_PBS16
  modified_base 1..3: mod_base = OTHER; note = 2'O-Methyl ribonucleotide
  misc_feature 1..4: note = Phosphorothioate linkage
  modified_base 138..140: mod_base = OTHER; note = 2'O-Methyl ribonucleotide
  misc_feature 137..140: note = Phosphorothioate linkage
gatgtctgcaggccagatgagttttagagctagaaatagcaagttaaaataaggctagtccgttatcaacttgaaaaagtgggaccgagtcggtccaatgtgccatctggagcactcatctggcctgcagacattttttt

SEQ ID NO: 910 - RNA, 144 nt, synthetic construct
  source 1..144: mol_type = other RNA; note = VEGFA_G_to_T_change_PBS20
  modified_base 1..3: mod_base = OTHER; note = 2'O-Methyl ribonucleotide
  misc_feature 1..4: note = Phosphorothioate linkage
  modified_base 142..144: mod_base = OTHER; note = 2'O-Methyl ribonucleotide
  misc_feature 141..144: note = Phosphorothioate linkage
gatgtctgcaggccagatgagttttagagctagaaatagcaagttaaaataaggctagtccgttatcaacttgaaaaagtggcaccgagtcggtgcaatgtgccatctggagcactcatctggcctgcagacatcaaatttttt

SEQ ID NO: 911 - RNA, 127 nt, synthetic construct
  source 1..127: mol_type = other RNA; note = VEGFA_deletion_change_PBS2
  modified_base 1..3: mod_base = OTHER; note = 2'O-Methyl ribonucleotide
  misc_feature 1..4: note = Phosphorothioate linkage
  modified_base 125..127: mod_base = OTHER; note = 2'O-Methyl ribonucleotide
  misc_feature 124..127: note = Phosphorothioate linkage
gatgtctgcaggccagatgagttttagagctagaaatagcaagttaaaataaggctagtccgttatcaacttgaaaaagtggcaccgagtcggtgcgtgtgtccctctgacaatgtgctcttttttt

SEQ ID NO: 912 - RNA, 129 nt, synthetic construct
  source 1..129: mol_type = other RNA; note = VEGFA_deletion_change_PBS4
  modified_base 1..3: mod_base = OTHER; note = 2'O-Methyl ribonucleotide
  misc_feature 1..4: note = Phosphorothioate linkage
  modified_base 127..129: mod_base = OTHER; note = 2'O-Methyl ribonucleotide
  misc_feature 126..129: note = Phosphorothioate linkage
gatgtctgcaggccagatgagttttagagctagaaatagcaagttaaaataaggctagtccgttatcaacttgaaaaagtggcaccgagtcggtgcgtgtgtccctctgacaatgtgctctgttttttt

SEQ ID NO: 913 - RNA, 131 nt, synthetic construct
  source 1..131: mol_type = other RNA; note = VEGFA_deletion_change_PBS6
  modified_base 1..3: mod_base = OTHER; note = 2'O-Methyl ribonucleotide
  misc_feature 1..4: note = Phosphorothioate linkage
  modified_base 129..131: mod_base = OTHER; note = 2'O-Methyl ribonucleotide
  misc_feature 128..131: note = Phosphorothioate linkage
gatgtctgcaggccagatgagttttagagctagaaatagcaagttaaaataaggctagtccgttatcaacttgaaaaagtggcaccgagtcggtgcgtgtgtccctctgacaatgtgctctggcttttttt

SEQ ID NO: 914 - RNA, 133 nt, synthetic construct
  source 1..133: mol_type = other RNA; note = VEGFA_deletion_change_PBS8
  modified_base 1..3: mod_base = OTHER; note = 2'O-Methyl ribonucleotide
  misc_feature 1..4: note = Phosphorothioate linkage
  modified_base 131..133: mod_base = OTHER; note = 2'O-Methyl ribonucleotide
  misc_feature 130..133: note = Phosphorothioate linkage
gatgtctgcaggccagatgagttttagagctagaaatagcaagttaaaataaggctagtccgttatcaacttgaaaaagtggcaccgagtcggtgcgtgtgtccctctgacaatgtgctctggcctttttttt

SEQ ID NO: 915 - RNA, 135 nt, synthetic construct
  source 1..135: mol_type = other RNA; note = VEGFA_deletion_change_PBS10
  modified_base 1..3: mod_base = OTHER; note = 2'O-Methyl ribonucleotide
  misc_feature 1..4: note = Phosphorothioate linkage
  modified_base 133..135: mod_base = OTHER; note = 2'O-Methyl ribonucleotide
  misc_feature 132..135: note = Phosphorothioate linkage
gatgtctgcaggccagatgagttttagagctagaaatagcaagttaaaataaggctagtccgttatcaacttgaaaaagtggcaccgagtcggtgcgtgtgtccctctgacaatgtgctctggcctgcttttttt

SEQ ID NO: 916 - RNA, 138 nt, synthetic construct
  source 1..138: mol_type = other RNA; note = VEGFA_deletion_change_PBS13
  modified_base 1..3: mod_base = OTHER; note = 2'O-Methyl ribonucleotide
  misc_feature 1..4: note = Phosphorothioate linkage
  modified_base 136..138: mod_base = OTHER; note = 2'O-Methyl ribonucleotide
  misc_feature 135..138: note = Phosphorothioate linkage
gatgtctgcaggccagatgagttttagagctagaaatagcaagttaaaataaggctagtccgttatcaacttgaaaaagtggcaccgagtcggtgcgtgtgtccctctgacaatgtgctctggcctgcagattttttt

SEQ ID NO: 917 - RNA, 141 nt, synthetic construct
  source 1..141: mol_type = other RNA; note = VEGFA_deletion_change_PBS16
  modified_base 1..3: mod_base = OTHER; note = 2'O-Methyl ribonucleotide
  misc_feature 1..4: note = Phosphorothioate linkage
  modified_base 139..141: mod_base = OTHER; note = 2'O-Methyl ribonucleotide
  misc_feature 138..141: note = Phosphorothioate linkage
gatgtctgcaggccagatgagttttagagctagaaatagcaagttaaaataaggctagtccgttatcaacttgaaaaagtggcaccgagtcggtgcgtgtgtccctctgacaatgtgctctggcctgcagacatttttttt

SEQ ID NO: 918 - RNA, 145 nt, synthetic construct
  source 1..145: mol_type = other RNA; note = VEGFA_deletion_change_PBS20
  modified_base 1..3: mod_base = OTHER; note = 2'O-Methyl ribonucleotide
  misc_feature 1..4: note = Phosphorothioate linkage
  modified_base 143..145: mod_base = OTHER; note = 2'O-Methyl ribonucleotide
  misc_feature 142..145: note = Phosphorothioate linkage
gatgtctgcaggccagatgagttttagagctagaaatagcaagttaaaataaggctagtccgttatcaacttgaaaaagtggcaccgagtcggtgcgtgtgtccctctgacaatgtgctctggcctgcagacatcaaattttttt

SEQ ID NO: 919 - RNA, 151 nt, synthetic construct
  source 1..151: mol_type = other RNA; note = VEGFA_insertion_change_PBS2
  modified_base 1..3: mod_base = OTHER; note = 2'O-Methyl ribonucleotide
  misc_feature 1..4: note = Phosphorothioate linkage
  modified_base 149..151: mod_base = OTHER; note = 2'O-Methyl ribonucleotide
  misc_feature 148..151: note = Phosphorothioate linkage
gatgtctgcaggccagatgagttttagagctagaaatagcaagttaaaataaggctagtccgttatcaacttgaaaaagtggcaccgagtcggtgcaatgtgccatctggagcactcacttatcgtcgtcatccttgtaatctcttttttt

SEQ ID NO: 920 - RNA, 153 nt, synthetic construct
  source 1..153: mol_type = other RNA; note = VEGFA_insertion_change_PBS4
  modified_base 1..3: mod_base = OTHER; note = 2'O-Methyl ribonucleotide
  misc_feature 1..4: note = Phosphorothioate linkage
  modified_base 151..153: mod_base = OTHER; note = 2'O-Methyl ribonucleotide
  misc_feature 150..153: note = Phosphorothioate linkage
gatgtctgcaggccagatgagttttagagctagaaatagcaagttaaaataaggctagtccgttatcaacttgaaaaagtggcaccgagtcggtgcaatgtgccatctggagcactcacttatcgtcgtcatccttgtaatctctgttttttt

SEQ ID NO: 921 - RNA, 155 nt, synthetic construct
  source 1..155: mol_type = other RNA; note = VEGFA_insertion_change_PBS6
  modified_base 1..3: mod_base = OTHER; note = 2'O-Methyl ribonucleotide
  misc_feature 1..4: note = Phosphorothioate linkage
  modified_base 153..155: mod_base = OTHER; note = 2'O-Methyl ribonucleotide
  misc_feature 152..155: note = Phosphorothioate linkage
gatgtctgcaggccagatgagttttagagctagaaatagcaagttaaaataaggctagtccgttatcaacttgaaaaagtggcaccgagtcggtgcaatgtgccatctggagcactcacttatcgtcgtcatccttgtaatctctggcttttttt

SEQ ID NO: 922 - RNA, 157 nt, synthetic construct
  source 1..157: mol_type = other RNA; note = VEGFA_insertion_change_PBS8
  modified_base 1..3: mod_base = OTHER; note = 2'O-Methyl ribonucleotide
  misc_feature 1..4: note = Phosphorothioate linkage
  modified_base 155..157: mod_base = OTHER; note = 2'O-Methyl ribonucleotide
  misc_feature 154..157: note = Phosphorothioate linkage
gatgtctgcaggccagatgagttttagagctagaaatagcaagttaaaataaggctagtccgttatcaacttgaaaaagtggcaccgagtcggtgcaatgtgccatctggagcactcacttatcgtcgtcatccttgtaatctctggcctttttttt

SEQ ID NO: 923 - RNA, 159 nt, synthetic construct
  source 1..159: mol_type = other RNA; note = VEGFA_insertion_change_PBS10
  modified_base 1..3: mod_base = OTHER; note = 2'O-Methyl ribonucleotide
  misc_feature 1..4: note = Phosphorothioate linkage
  modified_base 157..159: mod_base = OTHER; note = 2'O-Methyl ribonucleotide
  misc_feature 156..159: note = Phosphorothioate linkage
gatgtctgcaggccagatgagttttagagctagaaatagcaagttaaaataaggctagtccgttatcaacttgaaaaagtggcaccgagtcggtgcaatgtgccatctggagcactcacttatcgtcgtcatccttgtaatctctggcctgcttttttt

SEQ ID NO: 924 - RNA, 162 nt, synthetic construct
  source 1..162: mol_type = other RNA; note = VEGFA_insertion_change_PBS13
  modified_base 1..3: mod_base = OTHER; note = 2'O-Methyl ribonucleotide
  misc_feature 1..4: note = Phosphorothioate linkage
  modified_base 160..162: mod_base = OTHER; note = 2'O-Methyl ribonucleotide
  misc_feature 159..162: note = Phosphorothioate linkage
gatgtctgcaggccagatgagttttagagctagaaatagcaagttaaaataaggctagtccgttatcaacttgaaaaagtggcaccgagtcggtgcaatgtgccatctggagcactcacttatcgtcgtcatccttgtaatctctggcctgcagattttttt

SEQ ID NO: 925 - RNA, 165 nt, synthetic construct
  source 1..165: mol_type = other RNA; note = VEGFA_insertion_change_PBS16
  modified_base 1..3: mod_base = OTHER; note = 2'O-Methyl ribonucleotide
  misc_feature 1..4: note = Phosphorothioate linkage
  modified_base 163..165: mod_base = OTHER; note = 2'O-Methyl ribonucleotide
  misc_feature 162..165: note = Phosphorothioate linkage
gatgtctgcaggccagatgagttttagagctagaaatagcaagttaaaataaggctagtccgttatcaacttgaaaaagtggcaccgagtcggtgcaatgtgccatctggagcactcacttatcgtcgtcatccttgtaatctctggcctgcagacatttttttt

SEQ ID NO: 926 - RNA, 169 nt, synthetic construct
  source 1..169: mol_type = other RNA; note = VEGFA_insertion_change_PBS20
  modified_base 1..3: mod_base = OTHER; note = 2'O-Methyl ribonucleotide
  misc_feature 1..4: note = Phosphorothioate linkage
  modified_base 167..169: mod_base = OTHER; note = 2'O-Methyl ribonucleotide
  misc_feature 166..169: note = Phosphorothioate linkage
gatgtctgcaggccagatgagttttagagctagaaatagcaagttaaaataaggctagtccgttatcaacttgaaaaagtggcaccgagtcggtgcaatgtgccatctggagcactcacttatcgtcgtcatccttgtaatctctggcctgcagacatcaaattttttt

SEQ ID NO: 927 - DNA, 40 bp, synthetic construct
  source 1..40: mol_type = other DNA; note = VEGFA_forward_primer
gctcttccgatctnnnnnaaattcttctcccctgggaagc

SEQ ID NO: 928 - DNA, 40 bp, synthetic construct
  source 1..40: mol_type = other DNA; note = VEGFA_reverse_primer
gctcttccgatctnnnnntggaccccctatttctgacctc

SEQ ID NO: 929 - DNA, 230 bp, synthetic construct
  source 1..230: mol_type = other DNA; note = VEGFA_target_amplified
aaattcttctcccctgggaagcatccctggacacttcccaaaggaccccagtcactccagcctgttggctgccgctcactttgatgtctgcaggccagatgagggctccagatggcacattgtcagagggacacactgtggcccctgtgcccagccctgggctctctgtacatgaagcaactccagtcccaaatatgtagctgtttgggaggtcagaaatagggggtcca

SEQ ID NO: 930 - DNA, 105 bp, synthetic construct
  source 1..105: mol_type = other DNA; note = linker 1 for tethered RT
tctggcggcagcagcggcggctcaagcggaagtgaaacacctggaacttccgaaagcgctacgcctgaatcttctggtggatcttctggcggatcttccgcatgc

SEQ ID NO: 931 - DNA, 3402 bp, synthetic construct
  source 1..3402: mol_type = other DNA; note = MG3-6(H586A)
atgtcaacggacatgaagaactatcgtatcggggtcgacgtgggtgatcgaagcgtaggcctcgcagcgattgaatttgacgatgacggactgcctatacagaaactcgcattagtcaccttccgtcacgatggtggtctggatcctactaagaacaagacccctatgagtcgcaaggagacgcggggaatagccaggagaaccatgcgaatgaacagagagcggaaaagacggctccgtaacctggacaatgttttagaaaacttgggctactcagtcccggaaggaccagaacctgagacatatgaagcctggacctctcgggctcttctggcatccattaagctcgcaagtgccgatgagctgaatgaacatttggttagagcggtcagacatatggctcgacacaggggatgggccaatccgtggtggtctttagatcagctcgaaaaggctagtcaggagccaagcgagacattcgagatcatcctggcacgcgctagggagctgttcggagaaaaggtgcccgctaaccctacattaggtatgctgggcgccttagcggctaacaatgaggtactgcttcgacccagggacgagaagaaacgaaagaccggctacgtgagaggtacacccttaatgttcgcgcaggtcaggcagggagatcagctcgcggagctccgtcgaatctgcgaagttcaagggatcgaagatcaatatgaagctctgagattaggggtgttcgatcacaagcacccttacgtccctaaggaacgcgtcggaaaagacccactgaatccgagcacgaaccggaccatccgggctagtttggagttccaggaatttagaatattagattccgttgctaacctgagggtgagaatcggctcccgagctaaacgggagcttaccgaggcagagtacgacgcggccgtcgaatttcttatggattacgccgacaaggagcagccttcctgggctgacgttgcagagaaaatcggcgtacctggtaacaggctggtggcacccgtgttagaggacgtgcagcagaaaactgctccctatgataggtcttccgcggcatttgaaaaggcaatgggaaagaagaccgaagccagacagtggtgggaaagcactgatgatgaccaactgcggagtctcctgattgctttcctggtcgacgccaccaatgataccgaggaagcagcggcagaagccggacttagtgagttatataaatcatggcccgccgaggagagggaagcactctctaatatcgacttcgaaaagggaagagtggcctactcacaggaaaccttgagcaagttgtccgaatacatgcacgaataccgagttggcttgcatgaggccagaaaggctgtctttggggtcgacgatacatggcgcccaccacttgataaactggaagagcctacaggacagcctgctgtcgaccgcgttcttacaatactcaggcggttcgtgctggactgcgagcgccagtggggtcggcccagagccatcaccgtcgagcatacaaggactggattgatgggaccaacgcagcggcagaaaattcttaacgaacagaagaagaatcgggctgacaatgagcgtatccgcgacgaacttcgggaaagcggggtagataacccatcacgggcggaagttcggcgtcatttgatagtgcaagaacaggagtgccagtgtctgtattgtgggacaatgatcaccactaccactagtgaactggacgccatagtgccgcgggccggtggcggctcaagtaggcgtgagaacttggccgccgtctgtcgcgcttgtaatgccaagaagaaaagggagttattttatgcatgggccgggccggtgaagtcccaggagactatcgagagggtgagacagcttaaagccttcaaagactccaagaaagccaagatgtttaagaatcagatccgacgattaaatcagaccgaagcagatgaaccgatagacgagcgttctcttgcatccacttcatacgccgcagtcgctgtcagggagcggttagaacaacattttaacgagggtctggcacttgatgataaatcccgagtggtactggacgtgtatgccggcgctgtgacaagagagagtcgccgggcgggcgggatcgacgagcggattttattaaggggcgaacgggataagaaccgattcgacgttaggcaccatgcagtcgacgctgcagtgatgacactgcttaataggtccgtggcactgaccctggagcaacgtagccagctgcggcgcacattctatgaacagggactggacaagctggaccgcaatcaacttaagcctgaagaggactggagagatttcaccggcctggcccctgcatcccaggagaaattcttggagtggcggaaagctgccacaattctcggagacttgctggctgaggcaatagaagatgacagcattgcggttgtatcaccactccgccttagaccccagaacggatctgtgcaccttgaaaccatatccgctgtgaagaagcagacactcggttccgattggccagccgatgccgttaagagaatcgtggaccctgaaatttatcttgccatgaaagacgctctgggcaagctgaaggagctcccagaagactctgcacgaagcctggaactgccagatgggcgcttcgttgaagccgacgacgaagtcttgttcttccccgagaacgccgcatctattctgacacctcgcggggttgctgagattggtgggtcaatacaccacgcacggctctacggctggctgaccaagaagggagaactgaaggtagggatgcttagagtctacggggccgagttcccttggctgatgagggaaagtgggagccgaaacgttctgtccatgccaattcaccggggcagtcagtctttcagagatatgcaagatacaactaggaaggcggtggagagcggcgaagccgtcgagttcgcatggatcacacagaatgacgagctcgaatttgacccggatgactatatcgcccacggcggtaaggacgaactgcggcagttcctcgggttcatgccagagtgccggtggagagtcgatggctttaagaagaattatcagatcagaatcagaccagccatgctgtcacgagaacagctgccatccgatatacagaggcggctggagtctaaaacactgaccaagaatgaaagcttgctgctcaaggctcttgacacgggactcgtggttgcgatcggcggacttctcccattagaaaccttgaaggtgatacggcgaaacaatcttggatttcccagatggcgcggcaatggaaatcttccgacatcttttgaggtacgcagctccgctctccgagccctgggagtagaaggt

SEQ ID NO: 932 - DNA, 250 bp, synthetic construct
  source 1..250: mol_type = other DNA; note = AAVS1_target_amplified_ngs
cgtctaacccccacctcctgttaggcagattccttatctggtgacacacccccatttcctggagccatctctctccttgccagaacctctaaggtttgcttacgatggagccagagaggatcctgggagggagacttggcagggggtgggagggaagggggggatgcgtgacctgcccggttctcagtggccaccctgcgctaccctctcccagaacctgagctgctctgacgcggctgtctggtgcgtt

SEQ ID NO: 933 - DNA, 233 bp, synthetic construct
  source 1..233: mol_type = other DNA; note = B2M_target_amplified_ngs
acgcgcgctacttgcccctttcggcggggagcaggggagacctttggcctacggcgacgggagggtcgggacaaagtttagggcgtcgataagcgtcagagcgccgaggttgggggagggtttctcttccgctctttcgcggggcctctggctcccccagcgcagctggagtgggggacgggtaggctcgtcccaaaggcgcggcgctgaggtttgtgaacgcgtggaggggc

SEQ ID NO: 934 - RNA, 129 nt, synthetic construct
  source 1..129: mol_type = other RNA; note = AAVS1_PBS_2
  modified_base 1..3: mod_base = OTHER; note = 2'O-Methyl ribonucleotide
  misc_feature 1..4: note = Phosphorothioate linkage
  modified_base 127..129: mod_base = OTHER; note = 2'O-Methyl ribonucleotide
  misc_feature 126..129: note = Phosphorothioate linkage
ggctccatcgtaagcaaaccttgttgagaatcgaaagattcttaataaggcatccttccgatgctgacttctcaccgtccgttatccaataggagcgggcggtatggccagaccttctaaggttttttt

SEQ ID NO: 935 - RNA, 131 nt, synthetic construct
  source 1..131: mol_type = other RNA; note = AAVS1_PBS_4
  modified_base 1..3: mod_base = OTHER; note = 2'O-Methyl ribonucleotide
  misc_feature 1..4: note = Phosphorothioate linkage
  modified_base 129..131: mod_base = OTHER; note = 2'O-Methyl ribonucleotide
  misc_feature 128..131: note = Phosphorothioate linkage
ggctccatcgtaagcaaaccttgttgagaatcgaaagattcttaataaggcatccttccgatgctgacttctcaccgtccgttatccaataggagcgggcggtatggccagaccttctaaggttttttttt

SEQ ID NO: 936 - RNA, 135 nt, synthetic construct
  source 1..135: mol_type = other RNA; note = AAVS1_PBS_8
  modified_base 1..3: mod_base = OTHER; note = 2'O-Methyl ribonucleotide
  misc_feature 1..4: note = Phosphorothioate linkage
  modified_base 133..135: mod_base = OTHER; note = 2'O-Methyl ribonucleotide
  misc_feature 132..135: note = Phosphorothioate linkage
ggctccatcgtaagcaaaccttgttgagaatcgaaagattcttaataaggcatccttccgatgctgacttctcaccgtccgttatccaataggagcgggcggtatggccagaccttctaaggtttgctttttttt

SEQ ID NO: 937 - RNA, 137 nt, synthetic construct
  source 1..137: mol_type = other RNA; note = AAVS1_PBS_10
  modified_base 1..3: mod_base = OTHER; note = 2'O-Methyl ribonucleotide
  misc_feature 1..4: note = Phosphorothioate linkage
  modified_base 135..137: mod_base = OTHER; note = 2'O-Methyl ribonucleotide
  misc_feature 134..137: note = Phosphorothioate linkage
ggctccatcgtaagcaaaccttgttgagaatcgaaagattcttaataaggcatccttccgatgctgacttctcaccgtccgttatccaataggagcgggcggtatggccagaccttctaaggtttgcttactttttt

SEQ ID NO: 938 - RNA, 140 nt, synthetic construct
  source 1..140: mol_type = other RNA; note = AAVS1_PBS_13
  modified_base 1..3: mod_base = OTHER; note = 2'O-Methyl ribonucleotide
  misc_feature 1..4: note = Phosphorothioate linkage
  modified_base 138..140: mod_base = OTHER; note = 2'O-Methyl ribonucleotide
  misc_feature 137..140: note = Phosphorothioate linkage
ggctccatcgtaagcaaaccttgttgagaatcgaaagattcttaataaggcatccttccgatgctgacttctcaccgtccgttatccaataggagcgggcggtatggccagaccttctaaggtttgcttacgattttttt

SEQ ID NO: 939 - RNA, 143 nt, synthetic construct
  source 1..143: mol_type = other RNA; note = AAVS1_PBS_16
  modified_base 1..3: mod_base = OTHER; note = 2'O-Methyl ribonucleotide
  misc_feature 1..4: note = Phosphorothioate linkage
  modified_base 141..143: mod_base = OTHER; note = 2'O-Methyl ribonucleotide
  misc_feature 140..143: note = Phosphorothioate linkage
ggctccatcgtaagcaaaccttgttgagaatcgaaagattcttaataaggcatccttccgatgctgacttctcaccgtccgttatccaataggagcgggcggtatggccagaccttctaaggtttgcttacgatggatttttt

SEQ ID NO: 940 - RNA, 147 nt, synthetic construct
  source 1..147: mol_type = other RNA; note = AAVS1_PBS_20
  modified_base 1..3: mod_base = OTHER; note = 2'O-Methyl ribonucleotide
  misc_feature 1..4: note = Phosphorothioate linkage
  modified_base 145..147: mod_base = OTHER; note = 2'O-Methyl ribonucleotide
  misc_feature 144..147: note = Phosphorothioate linkage
ggctccatcgtaagcaaaccttgttgagaatcgaaagattcttaataaggcatccttccgatgctgacttctcaccgtccgttatccaataggagcgggcggtatggccagaccttctaaggtttgcttacgatggagccatttttt

SEQ ID NO: 941 - RNA, 112 nt, synthetic construct
  source 1..112: mol_type = other RNA; note = AAVS1_Guide
  modified_base 1..3: mod_base = OTHER; note = 2'O-Methyl ribonucleotide
  misc_feature 1..4: note = Phosphorothioate linkage
  modified_base 110..112: mod_base = OTHER; note = 2'O-Methyl ribonucleotide
  misc_feature 109..112: note = Phosphorothioate linkage
ggctccatcgtaagcaaaccttgttgagaatcgaaagattcttaataaggcatccttccgatgctgacttctcaccgtccgttatccaataggagcgggcggtatgtttttt

SEQ ID NO: 942 - RNA, 129 nt, synthetic construct
  source 1..129: mol_type = other RNA; note = B2M_PBS_2
  modified_base 1..3: mod_base = OTHER; note = 2'O-Methyl ribonucleotide
  misc_feature 1..4: note = Phosphorothioate linkage
  modified_base 127..129: mod_base = OTHER; note = 2'O-Methyl ribonucleotide
  misc_feature 126..129: note = Phosphorothioate linkage
cgtcagagcgccgaggttgggggttgagaatcgaaagattcttaataaggcatccttccgatgctgacttctcaccgtccgttatccaataggagcgggcggtatgagagaaacactcctccatttttt

SEQ ID NO: 943 - RNA, 131 nt, synthetic construct
  source 1..131: mol_type = other RNA; note = B2M_PBS_4
  modified_base 1..3: mod_base = OTHER; note = 2'O-Methyl ribonucleotide
  misc_feature 1..4: note = Phosphorothioate linkage
  modified_base 129..131: mod_base = OTHER; note = 2'O-Methyl ribonucleotide
  misc_feature 128..131: note = Phosphorothioate linkage
cgtcagagcgccgaggttgggggttgagaatcgaaagattcttaataaggcatccttccgatgctgacttctcaccgtccgttatccaataggagcgggcggtatgagagaaacactcctccaactttttt

SEQ ID NO: 944 - RNA, 135 nt, synthetic construct
  source 1..135: mol_type = other RNA; note = B2M_PBS_8
  modified_base 1..3: mod_base = OTHER; note = 2'O-Methyl ribonucleotide
  misc_feature 1..4: note = Phosphorothioate linkage
  modified_base 133..135: mod_base = OTHER; note = 2'O-Methyl ribonucleotide
  misc_feature 132..135: note = Phosphorothioate linkage
cgtcagagcgccgaggttgggggttgagaatcgaaagattcttaataaggcatccttccgatgctgacttctcaccgtccgttatccaataggagcgggcggtatgagagaaacactcctccaacctcgtttttt

SEQ ID NO: 945 - RNA, 137 nt, synthetic construct
  source 1..137: mol_type = other RNA; note = B2M_PBS_10
  modified_base 1..3: mod_base = OTHER; note = 2'O-Methyl ribonucleotide
  misc_feature 1..4: note = Phosphorothioate linkage
  modified_base 135..137: mod_base = OTHER; note = 2'O-Methyl ribonucleotide
  misc_feature 134..137: note = Phosphorothioate linkage
cgtcagagcgccgaggttgggggttgagaatcgaaagattcttaataaggcatccttccgatgctgacttctcaccgtccgttatccaataggagcgggcggtatgagagaaacactcctccaacctcggctttttt

SEQ ID NO: 946 - RNA, 140 nt, synthetic construct
  source 1..140: mol_type = other RNA; note = B2M_PBS_13
  modified_base 1..3: mod_base = OTHER; note = 2'O-Methyl ribonucleotide
  misc_feature 1..4: note = Phosphorothioate linkage
  modified_base 138..140: mod_base = OTHER; note = 2'O-Methyl ribonucleotide
  misc_feature 137..140: note = Phosphorothioate linkage
cgtcagagcgccgaggttgggggttgagaatcgaaagattcttaataaggcatccttccgatgctgacttctcaccgtccgttatccaataggagcgggcggtatgagagaaacactcctccaacctcggcgcttttttt

SEQ ID NO: 947 - RNA, 143 nt, synthetic construct
  source 1..143: mol_type = other RNA; note = B2M_PBS_16
  modified_base 1..3: mod_base = OTHER; note = 2'O-Methyl ribonucleotide
  misc_feature 1..4: note = Phosphorothioate linkage
  modified_base 141..143: mod_base = OTHER; note = 2'O-Methyl ribonucleotide
  misc_feature 140..143: note = Phosphorothioate linkage
cgtcagagcgccgaggttgggggttgagaatcgaaagattcttaataaggcatccttccgatgctgacttctcaccgtccgttatccaataggagcgggcggtatgagagaaacactcctccaacctcggcgctctgtttttt

SEQ ID NO: 948 - RNA, 147 nt, synthetic construct
  source 1..147: mol_type = other RNA; note = B2M_PBS_20
  modified_base 1..3: mod_base = OTHER; note = 2'O-Methyl ribonucleotide
  misc_feature 1..4: note = Phosphorothioate linkage
  modified_base 145..147: mod_base = OTHER; note = 2'O-Methyl ribonucleotide
  misc_feature 144..147: note = Phosphorothioate linkage
cgtcagagcgccgaggttgggggttgagaatcgaaagattcttaataaggcatccttccgatgctgacttctcaccgtccgttatccaataggagcgggcggtatgagagaaacactcctccaacctcggcgctctgacgctttttt

SEQ ID NO: 949 - RNA, 112 nt, synthetic construct
  source 1..112: mol_type = other RNA; note = B2M_Guide
  modified_base 1..3: mod_base = OTHER; note = 2'O-Methyl ribonucleotide
  misc_feature 1..4: note = Phosphorothioate linkage
  modified_base 110..112: mod_base = OTHER; note = 2'O-Methyl ribonucleotide
  misc_feature 109..112: note = Phosphorothioate linkage
cgtcagagcgccgaggttgggggttgagaatcgaaagattcttaataaggcatccttccgatgctgacttctcaccgtccgttatccaataggagcgggcggtatgtttttt

SEQ ID NO: 950 - RNA, 105 nt, synthetic construct
  source 1..105: mol_type = other RNA; note = Non-targeting Cas9 guide RNA
  modified_base 1..3: mod_base = OTHER; note = 2'O-Methyl ribonucleotide
  misc_feature 1..4: note = Phosphorothioate linkage
  modified_base 103..105: mod_base = OTHER; note = 2'O-Methyl ribonucleotide
  misc_feature 102..105: note = Phosphorothioate linkage
gggatccaccggagcttaagacgttttagagctagaaatagcaagttaaaataaggctagtccgttatcaacttgaaaaagtggcaccgagtcggtgcttttttt

SEQ ID NO: 951 - RNA, 103 nt, synthetic construct
  source 1..103: mol_type = other RNA; note = VEGFA targeting Cas9 guide RNA
  modified_base 1..3: mod_base = OTHER; note = 2'O-Methyl ribonucleotide
  misc_feature 1..4: note = Phosphorothioate linkage
  modified_base 101..103: mod_base = OTHER; note = 2'O-Methyl ribonucleotide
  misc_feature 100..103: note = Phosphorothioate linkage
gatgtctgcaggccagatgagttttagagctagaaatagcaagttaaaataaggctagtccgttatcaacttgaaaaagtggcaccgagtcggtgcttttttt

SEQ ID NO: 952 - DNA, 41 bp, synthetic construct
  source 1..41: mol_type = other DNA; note = AAVS1_forward_primer
gctcttccgatctnnnnncgtctaacccccacctcctgtta

SEQ ID NO: 953 - DNA, 39 bp, synthetic construct
  source 1..39: mol_type = other DNA; note = AAVS1_reverse_primer
gctcttccgatctnnnnnaacgcaccagacagccgcgtc

SEQ ID NO: 954 - DNA, 39 bp, synthetic construct
  source 1..39: mol_type = other DNA; note = B2M_forward_primer
gctcttccgatctnnnnnacgcgcgctacttgccccttt

SEQ ID NO: 955 - DNA, 39 bp, synthetic construct
  source 1..39: mol_type = other DNA; note = B2M_reverse_primer
gctcttccgatctnnnnngcccctccacgcgttcacaaa

SEQ ID NO: 956 - DNA, 4879 bp, synthetic construct
  source 1..4879: mol_type = other DNA; note = MG160-4_cloned_into_tethered_MG3-6(H586A)plasmid
atgcctaagaagaaacgaaaggttatgtcaacggacatgaagaactatcgtatcggggtcgacgtgggtgatcgaagcgtaggcctcgcagcgattgaatttgacgatgacggactgcctatacagaaactcgcattagtcaccttccgtcacgatggtggtctggatcctactaagaacaagacccctatgagtcgcaaggagacgcggggaatagccaggagaaccatgcgaatgaacagagagcggaaaagacggctccgtaacctggacaatgttttagaaaacttgggctactcagtcccggaaggaccagaacctgagacatatgaagcctggacctctcgggctcttctggcatccattaagctcgcaagtgccgatgagctgaatgaacatttggttagagcggtcagacatatggctcgacacaggggatgggccaatccgtggtggtctttagatcagctcgaaaaggctagtcaggagccaagcgagacattcgagatcatcctggcacgcgctagggagctgttcggagaaaaggtgcccgctaaccctacattaggtatgctgggcgccttagcggctaacaatgaggtactgcttcgacccagggacgagaagaaacgaaagaccggctacgtgagaggtacacccttaatgttcgcgcaggtcaggcagggagatcagctcgcggagctccgtcgaatctgcgaagttcaagggatcgaagatcaatatgaagctctgagattaggggtgttcgatcacaagcacccttacgtccctaaggaacgcgtcggaaaagacccactgaatccgagcacgaaccggaccatccgggctagtttggagttccaggaatttagaatattagattccgttgctaacctgagggtgagaatcggctcccgagctaaacgggagcttaccgaggcagagtacgacgcggccgtcgaatttcttatggattacgccgacaaggagcagccttcctgggctgacgttgcagagaaaatcggcgtacctggtaacaggctggtggcacccgtgttagaggacgtgcagcagaaaactgctccctatgataggtcttccgcggcatttgaaaaggcaatgggaaagaagaccgaagccagacagtggtgggaaagcactgatgatgaccaactgcggagtctcctgattgctttcctggtcgacgccaccaatgataccgaggaagcagcggcagaagccggacttagtgagttatataaatcatggcccgccgaggagagggaagcactctctaatatcgacttcgaaaagggaagagtggcctactcacaggaaaccttgagcaagttgtccgaatacatgcacgaataccgagttggcttgcatgaggccagaaaggctgtctttggggtcgacgatacatggcgcccaccacttgataaactggaagagcctacaggacagcctgctgtcgaccgcgttcttacaatactcaggcggttcgtgctggactgcgagcgccagtggggtcggcccagagccatcaccgtcgagcatacaaggactggattgatgggaccaacgcagcggcagaaaattcttaacgaacagaagaagaatcgggctgacaatgagcgtatccgcgacgaacttcgggaaagcggggtagataacccatcacgggcggaagttcggcgtcatttgatagtgcaagaacaggagtgccagtgtctgtattgtgggacaatgatcaccactaccactagtgaactggacgccatagtgccgcgggccggtggcggctcaagtaggcgtgagaacttggccgccgtctgtcgcgcttgtaatgccaagaagaaaagggagttattttatgcatgggccgggccggtgaagtcccaggagactatcgagagggtgagacagcttaaagccttcaaagactccaagaaagccaagatgtttaagaatcagatccgacgattaaatcagaccgaagcagatgaaccgatagacgagcgttctcttgcatccacttcatacgccgcagtcgctgtcagggagcggttagaacaacattttaacgagggtctggcacttgatgataaatcccgagtggtactggacgtgtatgccggcgctgtgacaagagagagtcgccgggcgggcgggatcgacgagcggattttattaaggggcgaacgggataagaaccgattcgacgttaggcaccatgcagtcgacgctgcagtgatgacactgcttaataggtccgtggcactgaccctggagcaacgtagccagctgcggcgcacattctatgaacagggactggacaagctggaccgcaatcaacttaagcctgaagaggactggagagatttcaccggcctggcccctgcatcccaggagaaattcttggagtggcggaaagctgccacaattctcggagacttgctggctgaggcaatagaagatgacagcattgcggttgtatcaccactccgccttagaccccagaacggatctgtgcaccttgaaaccatatccgctgtgaagaagcagacactcggttccgattggccagccgatgccgttaagagaatcgtggaccctgaaatttatcttgccatgaaagacgctctgggcaagctgaaggagctcccagaagactctgcacgaagcctggaactgccagatgggcgcttcgttgaagccgacgacgaagtcttgttcttccccgagaacgccgcatctattctgacacctcgcggggttgctgagattggtgggtcaatacaccacgcacggctctacggctggctgaccaagaagggagaactgaaggtagggatgcttagagtctacggggccgagttcccttggctgatgagggaaagtgggagccgaaacgttctgtccatgccaattcaccggggcagtcagtctttcagagatatgcaagatacaactaggaaggcggtggagagcggcgaagccgtcgagttcgcatggatcacacagaatgacgagctcgaatttgacccggatgactatatcgcccacggcggtaaggacgaactgcggcagttcctcgggttcatgccagagtgccggtggagagtcgatggctttaagaagaattatcagatcagaatcagaccagccatgctgtcacgagaacagctgccatccgatatacagaggcggctggagtctaaaacactgaccaagaatgaaagcttgctgctcaaggctcttgacacgggactcgtggttgcgatcggcggacttctcccattagaaaccttgaaggtgatacggcgaaacaatcttggatttcccagatggcgcggcaatggaaatcttccgacatcttttgaggtacgcagctccgctctccgagccctgggagtagaaggttctggcggcagcagcggcggctcaagcggaagtgaaacacctggaacttccgaaagcgctacgcctgaatcttctggtggatcttctggcggatcttccgcatgcgttacccagaagtggacccatcgataccagttgaaacccggccgatgggtttttgcccccacagatgaggccaagaagtgcggtgctcacattaagcgcagcgtggcttccaggtggaaggccccaaacttctactatcacctcagaaatggcgggcacgttgcggccgtacggtcccacgaactgagccggtttttcttccgggcagatttggacgatttctttgggagagtgaaccggtctcgcgtgacccggtgccttaaaccttggttctcatacgccgaagcaagggagatggcctcagaatctgtcgtgaagcgacctggagagacagcctttgtgctgccgtatgggttcgtgcagagccctatcctcgcatccttggccctggacaagagtaaactgggtagcctgctgagatcactggacgggggccgcgatttcacggtgagcgtctatgtcgacgacatcattatctctggagacgacgaagctcaacttaaagaggtagcatcccgccttgagagagtggcgagtgaggccctgtttccactcagcagtggcaaaactcagggacccgcctctggagtgactgtttttaacatagaactgtcccatagaatgctcaggattaccgatgataggctcgcttcactgaggctcgactatcaggcgactgcatctgagcattgtaaagctggcatcgtctcctacgtatacagtgtgaatccagatcaggtcgctcaagtgacacctaggggcggcggaggcagctacccctatgatgtacctgattatgcttctggcggacccaagaagaagaggaaagtcggtggttctcctaagaaaaagagaaaggtcggatccggcgccaccaattttagccttttaaagcaggctggcgacgttgaggaaaacccggggcccatggaccaagccaaacccctgagccaagaggagtctacactgatcgagcgggccaccgcaaccattaatagtattccaattagtgaggattattctgtggcatccgccgcattatccagtgatgggcgtattttcaccggcgttaacgtgtaccacttcaccggcggcccctgcgcagagctggtcgttttgggtacagcagcagcagcagccgccgggaatctcacctgcattgtggcaataggcaacgaaaatcggggaattttatcaccgtgtggtcgttgtcgccaagttctgcttgacctgcaccccggcattaaggcaatcgttaaagattccgacggccaacccacagctgtcggcatacgagagttacttccaagcggatacgtttgggaaggatagggatccgcaggcctct

SEQ ID NO: 957 - DNA, 4863 bp, synthetic construct
  source 1..4863: mol_type = other DNA; note = MG160-4_cloned_into_tethered_MG3-6(H586A)plasmid
atgcctaagaagaaacgaaaggttgttacccagaagtggacccatcgataccagttgaaacccggccgatgggtttttgcccccacagatgaggccaagaagtgcggtgctcacattaagcgcagcgtggcttccaggtggaaggccccaaacttctactatcacctcagaaatggcgggcacgttgcggccgtacggtcccacgaactgagccggtttttcttccgggcagatttggacgatttctttgggagagtgaaccggtctcgcgtgacccggtgccttaaaccttggttctcatacgccgaagcaagggagatggcctcagaatctgtcgtgaagcgacctggagagacagcctttgtgctgccgtatgggttcgtgcagagccctatcctcgcatccttggccctggacaagagtaaactgggtagcctgctgagatcactggacgggggccgcgatttcacggtgagcgtctatgtcgacgacatcattatctctggagacgacgaagctcaacttaaagaggtagcatcccgccttgagagagtggcgagtgaggccctgtttccactcagcagtggcaaaactcagggacccgcctctggagtgactgtttttaacatagaactgtcccatagaatgctcaggattaccgatgataggctcgcttcactgaggctcgactatcaggcgactgcatctgagcattgtaaagctggcatcgtctcctacgtatacagtgtgaatccagatcaggtcgctcaagtgacatctggcggcagcagcggcggctcaagcggaagtgaaacacctggaacttccgaaagcgctacgcctgaatcttctggtggatcttctggcggatcttccgcatgcatgtcaacggacatgaagaactatcgtatcggggtcgacgtgggtgatcgaagcgtaggcctcgcagcgattgaatttgacgatgacggactgcctatacagaaactcgcattagtcaccttccgtcacgatggtggtctggatcctactaagaacaagacccctatgagtcgcaaggagacgcggggaatagccaggagaaccatgcgaatgaacagagagcggaaaagacggctccgtaacctggacaatgttttagaaaacttgggctactcagtcccggaaggaccagaacctgagacatatgaagcctggacctctcgggctcttctggcatccattaagctcgcaagtgccgatgagctgaatgaacatttggttagagcggtcagacatatggctcgacacaggggatgggccaatccgtggtggtctttagatcagctcgaaaaggctagtcaggagccaagcgagacattcgagatcatcctggcacgcgctagggagctgttcggagaaaaggtgcccgctaaccctacattaggtatgctgggcgccttagcggctaacaatgaggtactgcttcgacccagggacgagaagaaacgaaagaccggctacgtgagaggtacacccttaatgttcgcgcaggtcaggcagggagatcagctcgcggagctccgtcgaatctgcgaagttcaagggatcgaagatcaatatgaagctctgagattaggggtgttcgatcacaagcacccttacgtccctaaggaacgcgtcggaaaagacccactgaatccgagcacgaaccggaccatccgggctagtttggagttccaggaatttagaatattagattccgttgctaacctgagggtgagaatcggctcccgagctaaacgggagcttaccgaggcagagtacgacgcggccgtcgaatttcttatggattacgccgacaaggagcagccttcctgggctgacgttgcagagaaaatcggcgtacctggtaacaggctggtggcacccgtgttagaggacgtgcagcagaaaactgctccctatgataggtcttccgcggcatttgaaaaggcaatgggaaagaagaccgaagccagacagtggtgggaaagcactgatgatgaccaactgcggagtctcctgattgctttcctggtcgacgccaccaatgataccgaggaagcagcggcagaagccggacttagtgagttatataaatcatggcccgccgaggagagggaagcactctctaatatcgacttcgaaaagggaagagtggcctactcacaggaaaccttgagcaagttgtccgaatacatgcacgaataccgagttggcttgcatgaggccagaaaggctgtctttggggtcgacgatacatggcgcccaccacttgataaactggaagagcctacaggacagcctgctgtcgaccgcgttcttacaatactcaggcggttcgtgctggactgcgagcgccagtggggtcggcccagagccatcaccgtcgagcatacaaggactggattgatgggaccaacgcagcggcagaaaattcttaacgaacagaagaagaatcgggctgacaatgagcgtatccgcgacgaacttcgggaaagcggggtagataacccatcacgggcggaagttcggcgtcatttgatagtgcaagaacaggagtgccagtgtctgtattgtgggacaatgatcaccactaccactagtgaactggacgccatagtgccgcgggccggtggcggctcaagtaggcgtgagaacttggccgccgtctgtcgcgcttgtaatgccaagaagaaaagggagttattttatgcatgggccgggccggtgaagtcccaggagactatcgagagggtgagacagcttaaagccttcaaagactccaagaaagccaagatgtttaagaatcagatccgacgattaaatcagaccgaagcagatgaaccgatagacgagcgttctcttgcatccacttcatacgccgcagtcgctgtcagggagcggttagaacaacattttaacgagggtctggcacttgatgataaatcccgagtggtactggacgtgtatgccggcgctgtgacaagagagagtcgccgggcgggcgggatcgacgagcggattttattaaggggcgaacgggataagaaccgattcgacgttaggcaccatgcagtcgacgctgcagtgatgacactgcttaataggtccgtggcactgaccctggagcaacgtagccagctgcggcgcacattctatgaacagggactggacaagctggaccgcaatcaacttaagcctgaagaggactggagagatttcaccggcctggcccctgcatcccaggagaaattcttggagtggcggaaagctgccacaattctcggagacttgctggctgaggcaatagaagatgacagcattgcggttgtatcaccactccgccttagaccccagaacggatctgtgcaccttgaaaccatatccgctgtgaagaagcagacactcggttccgattggccagccgatgccgttaagagaatcgtggaccctgaaatttatcttgccatgaaagacgctctgggcaagctgaaggagctcccagaagactctgcacgaagcctggaactgccagatgggcgcttcgttgaagccgacgacgaagtcttgttcttccccgagaacgccgcatctattctgacacctcgcggggttgctgagattggtgggtcaatacaccacgcacggctctacggctggctgaccaagaagggagaactgaaggtagggatgcttagagtctacggggccgagttcccttggctgatgagggaaagtgggagccgaaacgttctgtccatgccaattcaccggggcagtcagtctttcagagatatgcaagatacaactaggaaggcggtggagagcggcgaagccgtcgagttcgcatggatcacacagaatgacgagctcgaatttgacccggatgactatatcgcccacggcggtaaggacgaactgcggcagttcctcgggttcatgccagagtgccggtggagagtcgatggctttaagaagaattatcagatcagaatcagaccagccatgctgtcacgagaacagctgccatccgatatacagaggcggctggagtctaaaacactgaccaagaatgaaagcttgctgctcaaggctcttgacacgggactcgtggttgcgatcggcggacttctcccattagaaaccttgaaggtgatacggcgaaacaatcttggatttcccagatggcgcggcaatggaaatcttccgacatcttttgaggtacgcagctccgctctccgagccctgggagtagaaggtcctaggggcggcggaggcagctacccctatgatgtacctgattatgcttctggcggacccaagaagaagaggaaagtcggtggttctcctaagaaaaagagaaaggtcggatccggcgccaccaattttagccttttaaagcaggctggcgacgttgaggaaaacccggggcccatggaccaagccaaacccctgagccaagaggagtctacactgatcgagcgggccaccgcaaccattaatagtattccaattagtgaggattattctgtggcatccgccgcattatccagtgatgggcgtattttcaccggcgttaacgtgtaccacttcaccggcggcccctgcgcagagctggtcgttttgggtacagcagcagcagcagccgccgggaatctcacctgcattgtggcaataggcaacgaaaatcggggaattttatcaccgtgtggtcgttgtcgccaagttctgcttgacctgcaccccggcattaaggcaatcgttaaagattccgacggccaacccacagctgtcggcatacgagagttacttccaagcggatacgtttgggaaggatag

SEQ ID NO: 958 - DNA, 5952 bp, synthetic construct
  source 1..5952: mol_type = other DNA; note = MG151-99_cloned_into_tethered_MG3-6(H586A)plasmid
atgcctaagaagaaacgaaaggttcgtgccgtgcaggcaattattcgaggacatgccgagatagagcctatatgcctgcctcagccgcgcaggattaccaacacgaagcagtatcggctgcctgggggacagcaggagataacaaagactgtgcaagagctggagcgcgtcggaattattagacccgctcatagtccatataacagcccaatttggcccgtacgtaagcctgatggaacttggcggatgactgttgactatcgcgaactcaataaagtgactccaccaattcacgcagccgtgcctaatatcgcaagcctcatggatacactgagccgagaaatcgagacttatcactgtgtgctggacctggcaaatgcctttttctccatcccgatcgccaaggagtctcaagaccagtttgcctttacctgggaaggaagacagtggaccttccaggtccttccacagggctacgttcacagtccgacattttgccacaacttggtcgcctccgatttggctaactggaataagcccagtacagttaagatgtttcattacatagacgaccttatgcttacaagcgattccatcgaggctcttgagaagacagttccctcactgatcacttacttgcaggaaaaagggtgggcaattaatccccagaaggtccaaggacccggtctgagcgttaagttcctgggtgttgtgtggagtggcaagacaaaagtgctccccagcgccatcatcgacaaaattcaggcattccccgtcccaacgaagccaaaacagctccaggagtttctgggtatcctcggctattggaggtcttttattccccacctcgcacagcttcttaaacccttgtatcggctcactaagaaaggccaggtgtgggattggggacgcacagagcaagaggccttccagcaagccaagattgctgtgaagcaagctcaggcacttgggatctttgaccccacactcccagccgagctggatgtgcatgtaacacaggagggcttcgggtggggcctctggcagcggcaaggttccgtgcgaatccctatcggcttctggtctcaaatctggcatggggccgaggagcgctactccatggtcgaaaagcagctgctcgccacatactcagccctccaggctgtggagcccattacacagactgctgaagtaattgttaaaactacacttcctatccagggttgggtgaaagacttgacacacattcctaagaccggcgttgctcagagccaaaccgtggcaaggtgggtagcatatctctctcaacgttcccgcctcagttccagccctctgaaggaagagctccagaagattttgggacctgtaacataccatagcgagactccagaggagatcgtcgtgacctgcccagaaaagtcacctgttcaggaaggcaaataccccattcctgaggatgcttggtacactgacggaagttctcgggggaatcccagcagatggagggcagtggcttatcacccatccactgagacaatttggtttgaagaaggggacggacagtcatctcagtgggccgagctgcgagccgtatggatggtgatcacacaggagccagggaactctgctcttaacatttgtactgactcatgggcagtttacagggggctgaccctctggatcgcacagtgggctacacaggattggactatccatgcaaggcctatttggggtaaggacatgtgggtggacatctggaacgtagtccgccataggacggtgagggcttatcacgtgagcggacaccaacctctgcagagccctggcaatgatgaggccgacaccctggccagggtcaggtggctgtctggcggcagcagcggcggctcaagcggaagtgaaacacctggaacttccgaaagcgctacgcctgaatcttctggtggatcttctggcggatcttccgcatgcatgtcaacggacatgaagaactatcgtatcggggtcgacgtgggtgatcgaagcgtaggcctcgcagcgattgaatttgacgatgacggactgcctatacagaaactcgcattagtcaccttccgtcacgatggtggtctggatcctactaagaacaagacccctatgagtcgcaaggagacgcggggaatagccaggagaaccatgcgaatgaacagagagcggaaaagacggctccgtaacctggacaatgttttagaaaacttgggctactcagtcccggaaggaccagaacctgagacatatgaagcctggacctctcgggctcttctggcatccattaagctcgcaagtgccgatgagctgaatgaacatttggttagagcggtcagacatatggctcgacacaggggatgggccaatccgtggtggtctttagatcagctcgaaaaggctagtcaggagccaagcgagacattcgagatcatcctggcacgcgctagggagctgttcggagaaaaggtgcccgctaaccctacattaggtatgctgggcgccttagcggctaacaatgaggtactgcttcgacccagggacgagaagaaacgaaagaccggctacgtgagaggtacacccttaatgttcgcgcaggtcaggcagggagatcagctcgcggagctccgtcgaatctgcgaagttcaagggatcgaagatcaatatgaagctctgagattaggggtgttcgatcacaagcacccttacgtccctaaggaacgcgtcggaaaagacccactgaatccgagcacgaaccggaccatccgggctagtttggagttccaggaatttagaatattagattccgttgctaacctgagggtgagaatcggctcccgagctaaacgggagcttaccgaggcagagtacgacgcggccgtcgaatttcttatggattacgccgacaaggagcagccttcctgggctgacgttgcagagaaaatcggcgtacctggtaacaggctggtggcacccgtgttagaggacgtgcagcagaaaactgctccctatgataggtcttccgcggcatttgaaaaggcaatgggaaagaagaccgaagccagacagtggtgggaaagcactgatgatgaccaactgcggagtctcctgattgctttcctggtcgacgccaccaatgataccgaggaagcagcggcagaagccggacttagtgagttatataaatcatggcccgccgaggagagggaagcactctctaatatcgacttcgaaaagggaagagtggcctactcacaggaaaccttgagcaagttgtccgaatacatgcacgaataccgagttggcttgcatgaggccagaaaggctgtctttggggtcgacgatacatggcgcccaccacttgataaactggaagagcctacaggacagcctgctgtcgaccgcgttcttacaatactcaggcggttcgtgctggactgcgagcgccagtggggtcggcccagagccatcaccgtcgagcatacaaggactggattgatgggaccaacgcagcggcagaaaattcttaacgaacagaagaagaatcgggctgacaatgagcgtatccgcgacgaacttcgggaaagcggggtagataacccatcacgggcggaagttcggcgtcatttgatagtgcaagaacaggagtgccagtgtctgtattgtgggacaatgatcaccactaccactagtgaactggacgccatagtgccgcgggccggtggcggctcaagtaggcgtgagaacttggccgccgtctgtcgcgcttgtaatgccaagaagaaaagggagttattttatgcatgggccgggccggtgaagtcccaggagactatcgagagggtgagacagcttaaagccttcaaagactccaagaaagccaagatgtttaagaatcagatccgacgattaaatcagaccgaagcagatgaaccgatagacgagcgttctcttgcatccacttcatacgccgcagtcgctgtcagggagcggttagaacaacattttaacgagggtctggcacttgatgataaatcccgagtggtactggacgtgtatgccggcgctgtgacaagagagagtcgccgggcgggcgggatcgacgagcggattttattaaggggcgaacgggataagaaccgattcgacgttaggcaccatgcagtcgacgctgcagtgatgacactgcttaataggtccgtggcactgaccctggagcaacgtagccagctgcggcgcacattctatgaacagggactggacaagctggaccgcaatcaacttaagcctgaagaggactggagagatttcaccggcctggcccctgcatcccaggagaaattcttggagtggcggaaagctgccacaattctcggagacttgctggctgaggcaatagaagatgacagcattgcggttgtatcaccactccgccttagaccccagaacggatctgtgcaccttgaaaccatatccgctgtgaagaagcagacactcggttccgattggccagccgatgccgttaagagaatcgtggaccctgaaatttatcttgccatgaaagacgctctgggcaagctgaaggagctcccagaagactctgcacgaagcctggaactgccagatgggcgcttcgttgaagccgacgacgaagtcttgttcttccccgagaacgccgcatctattctgacacctcgcggggttgctgagattggtgggtcaatacaccacgcacggctctacggctggctgaccaagaagggagaactgaaggtagggatgcttagagtctacggggccgagttcccttggctgatgagggaaagtgggagccgaaacgttctgtccatgccaattcaccggggcagtcagtctttcagagatatgcaagatacaactaggaaggcggtggagagcggcgaagccgtcgagttcgcatggatcacacagaatgacgagctcgaatttgacccggatgactatatcgcccacggcggtaaggacgaactgcggcagttcctcgggttcatgccagagtgccggtggagagtcgatggctttaagaagaattatcagatcagaatcagaccagccatgctgtcacgagaacagctgccatccgatatacagaggcggctggagtctaaaacactgaccaagaatgaaagcttgctgctcaaggctcttgacacgggactcgtggttgcgatcggcggacttctcccattagaaaccttgaaggtgatacggcgaaacaatcttggatttcccagatggcgcggcaatggaaatcttccgacatcttttgaggtacgcagctccgctctccgagccctgggagtagaaggtcctaggggcggcggaggcagctacccctatgatgtacctgattatgcttctggcggacccaagaagaagaggaaagtcggtggttctcctaagaaaaagagaaaggtcggatccggcgccaccaattttagccttttaaagcaggctggcgacgttgaggaaaacccggggcccatggaccaagccaaacccctgagccaagaggagtctacactgatcgagcgggccaccgcaaccattaatagtattccaattagtgaggattattctgtggcatccgccgcattatccagtgatgggcgtattttcaccggcgttaacgtgtaccacttcaccggcggcccctgcgcagagctggtcgttttgggtacagcagcagcagcagccgccgggaatctcacctgcattgtggcaataggcaacgaaaatcggggaattttatcaccgtgtggtcgttgtcgccaagttctgcttgacctgcaccccggcattaaggcaatcgttaaagattccgacggccaacccacagctgtcggcatacgagagttacttccaagcggatacgtttgggaaggatag

SEQ ID NO: 959 - DNA, 5277 bp, synthetic construct
  source 1..5277: mol_type = other DNA; note = MG153-53_cloned_into_tethered_MG3-6(H586A)plasmid
atgcctaagaagaaacgaaaggttgcatgcgtcgacaagaagagaaaatggtacagtctggttgacaagatctggaaattcagtaacctcgaagcagctttcagcaaagtaaaagagaaccggggagccgcagggatcgacagagtgagcatcggccagttcgagaggcagaagcaacagaatcttttggagatccaaagacttctgaggagcaaacgctacgaggcaattccagtcagacgcgttgaaatacctaagagcgacggacggtatagacctctgggcattcctacggtcagagatcgcgtggtgcagcaggctacctttgctgttatgtcccctatttttgagacaaagtttctggactgttcttacgggtttaggaagggacgaaatacgcaccaggccattgccaaaatggaacaatacaggaatgagggctgcgagtgggtggtggaagctgatatagagtcattttttgacaccgttaatcacgagttgcttattgatcaggttgctgaggaaatctcagatggttcagtgcttaagcttattaggtcctggctgactgccggcgcatttaaaggaacagaagtgattgagacttctgtgggaacaccacaagggggtgtcatttccccgcttctcgcaaatatatatctgcacccattcgatgtacagatgacagccctgggcttcaagctggtgaggtatgccgatgatttcgtcataatgtgcagaagcgaggacgaggcagaacgggccatggaagccgctacccggatcctctctgggattaaactccgggtaaaggccgctaaaacccgaatagtgcagctgagtaaggacgacggaatcgaatttctcggtttcaccatcttcaaggaacataaggtcccccgaactagagctgtcgagaatttcaaatcacgcattcgcctgatcactcgaagacagaggcccgctacccttcaggagatcatcaaggaactgaatcccgtggtgcggggttggggaaactatttcaaaattgccaacgtaaactggctctacaaaggcttggattcttggatgcgaatgcgccttcggtcttttctcgagaagaagaagagctatgaagccaacaaaaggctggaaaacaaacattttagtgaagcaggcttgactacactgtcctccttgatcgggtactctggcggcagcagcggcggctcaagcggaagtgaaacacctggaacttccgaaagcgctacgcctgaatcttctggtggatcttctggcggatcttccgcatgcatgtcaacggacatgaagaactatcgtatcggggtcgacgtgggtgatcgaagcgtaggcctcgcagcgattgaatttgacgatgacggactgcctatacagaaactcgcattagtcaccttccgtcacgatggtggtctggatcctactaagaacaagacccctatgagtcgcaaggagacgcggggaatagccaggagaaccatgcgaatgaacagagagcggaaaagacggctccgtaacctggacaatgttttagaaaacttgggctactcagtcccggaaggaccagaacctgagacatatgaagcctggacctctcgggctcttctggcatccattaagctcgcaagtgccgatgagctgaatgaacatttggttagagcggtcagacatatggctcgacacaggggatgggccaatccgtggtggtctttagatcagctcgaaaaggctagtcaggagccaagcgagacattcgagatcatcctggcacgcgctagggagctgttcggagaaaaggtgcccgctaaccctacattaggtatgctgggcgccttagcggctaacaatgaggtactgcttcgacccagggacgagaagaaacgaaagaccggctacgtgagaggtacacccttaatgttcgcgcaggtcaggcagggagatcagctcgcggagctccgtcgaatctgcgaagttcaagggatcgaagatcaatatgaagctctgagattaggggtgttcgatcacaagcacccttacgtccctaaggaacgcgtcggaaaagacccactgaatccgagcacgaaccggaccatccgggctagtttggagttccaggaatttagaatattagattccgttgctaacctgagggtgagaatcggctcccgagctaaacgggagcttaccgaggcagagtacgacgcggccgtcgaatttcttatggattacgccgacaaggagcagccttcctgggctgacgttgcagagaaaatcggcgtacctggtaacaggctggtggcacccgtgttagaggacgtgcagcagaaaactgctccctatgataggtcttccgcggcatttgaaaaggcaatgggaaagaagaccgaagccagacagtggtgggaaagcactgatgatgaccaactgcggagtctcctgattgctttcctggtcgacgccaccaatgataccgaggaagcagcggcagaagccggacttagtgagttatataaatcatggcccgccgaggagagggaagcactctctaatatcgacttcgaaaagggaagagtggcctactcacaggaaaccttgagcaagttgtccgaatacatgcacgaataccgagttggcttgcatgaggccagaaaggctgtctttggggtcgacgatacatggcgcccaccacttgataaactggaagagcctacaggacagcctgctgtcgaccgcgttcttacaatactcaggcggttcgtgctggactgcgagcgccagtggggtcggcccagagccatcaccgtcgagcatacaaggactggattgatgggaccaacgcagcggcagaaaattcttaacgaacagaagaagaatcgggctgacaatgagcgtatccgcgacgaacttcgggaaagcggggtagataacccatcacgggcggaagttcggcgtcatttgatagtgcaagaacaggagtgccagtgtctgtattgtgggacaatgatcaccactaccactagtgaactggacgccatagtgccgcgggccggtggcggctcaagtaggcgtgagaacttggccgccgtctgtcgcgcttgtaatgccaagaagaaaagggagttattttatgcatgggccgggccggtgaagtcccaggagactatcgagagggtgagacagcttaaagccttcaaagactccaagaaagccaagatgtttaagaatcagatccgacgattaaatcagaccgaagcagatgaaccgatagacgagcgttctcttgcatccacttcatacgccgcagtcgctgtcagggagcggttagaacaacattttaacgagggtctggcacttgatgataaatcccgagtggtactggacgtgtatgccggcgctgtgacaagagagagtcgccgggcgggcgggatcgacgagcggattttattaaggggcgaacgggataagaaccgattcgacgttaggcaccatgcagtcgacgctgcagtgatgacactgcttaataggtccgtggcactgaccctggagcaacgtagccagctgcggcgcacattctatgaacagggactggacaagctggaccgcaatcaacttaagcctgaagaggactggagagatttcaccggcctggcccctgcatcccaggagaaattcttggagtggcggaaagctgccacaattctcggagacttgctggctgaggcaatagaagatgacagcattgcggttgtatcaccactccgccttagaccccagaacggatctgtgcaccttgaaaccatatccgctgtgaagaagcagacactcggttccgattggccagccgatgccgttaagagaatcgtggaccctgaaatttatcttgccatgaaagacgctctgggcaagctgaaggagctcccagaagactctgcacgaagcctggaactgccagatgggcgcttcgttgaagccgacgacgaagtcttgttcttccccgagaacgccgcatctattctgacacctcgcggggttgctgagattggtgggtcaatacaccacgcacggctctacggctggctgaccaagaagggagaactgaaggtagggatgcttagagtctacggggccgagttcccttggctgatgagggaaagtgggagccgaaacgttctgtccatgccaattcaccggggcagtcagtctttcagagatatgcaagatacaactaggaaggcggtggagagcggcgaagccgtcgagttcgcatggatcacacagaatgacgagctcgaatttgacccggatgactatatcgcccacggcggtaaggacgaactgcggcagttcctcgggttcatgccagagtgccggtggagagtcgatggctttaagaagaattatcagatcagaatcagaccagccatgctgtcacgagaacagctgccatccgatatacagaggcggctggagtctaaaacactgaccaagaatgaaagcttgctgctcaaggctcttgacacgggactcgtggttgcgatcggcggacttctcccattagaaaccttgaaggtgatacggcgaaacaatcttggatttcccagatggcgcggcaatggaaatcttccgacatcttttgaggtacgcagctccgctctccgagccctgggagtagaaggtcctaggggcggcggaggcagctacccctatgatgtacctgattatgcttctggcggacccaagaagaagaggaaagtcggtggttctcctaagaaaaagagaaaggtcggatccggcgccaccaattttagccttttaaagcaggctggcgacgttgaggaaaacccggggcccatggaccaagccaaacccctgagccaagaggagtctacactgatcgagcgggccaccgcaaccattaatagtattccaattagtgaggattattctgtggcatccgccgcattatccagtgatgggcgtattttcaccggcgttaacgtgtaccacttcaccggcggcccctgcgcagagctggtcgttttgggtacagcagcagcagcagccgccgggaatctcacctgcattgtggcaataggcaacgaaaatcggggaattttatcaccgtgtggtcgttgtcgccaagttctgcttgacctgcaccccggcattaaggcaatcgttaaagattccgacggccaacccacagctgtcggcatacgagagttacttccaagcggatacgtttgggaaggatag

SEQ ID NO: 960 - DNA, 6199 bp, synthetic construct
  source 1..6199: mol_type = other DNA; note = MMLV1_cloned_into_tethered_MG3-6(H586A)plasmid
atgcctaagaagaaacgaaaggttatgtcaacggacatgaagaactatcgtatcggggtcgacgtgggtgatcgaagcgtaggcctcgcagcgattgaatttgacgatgacggactgcctatacagaaactcgcattagtcaccttccgtcacgatggtggtctggatcctactaagaacaagacccctatgagtcgcaaggagacgcggggaatagccaggagaaccatgcgaatgaacagagagcggaaaagacggctccgtaacctggacaatgttttagaaaacttgggctactcagtcccggaaggaccagaacctgagacatatgaagcctggacctctcgggctcttctggcatccattaagctcgcaagtgccgatgagctgaatgaacatttggttagagcggtcagacatatggctcgacacaggggatgggccaatccgtggtggtctttagatcagctcgaaaaggctagtcaggagccaagcgagacattcgagatcatcctggcacgcgctagggagctgttcggagaaaaggtgcccgctaaccctacattaggtatgctgggcgccttagcggctaacaatgaggtactgcttcgacccagggacgagaagaaacgaaagaccggctacgtgagaggtacacccttaatgttcgcgcaggtcaggcagggagatcagctcgcggagctccgtcgaatctgcgaagttcaagggatcgaagatcaatatgaagctctgagattaggggtgttcgatcacaagcacccttacgtccctaaggaacgcgtcggaaaagacccactgaatccgagcacgaaccggaccatccgggctagtttggagttccaggaatttagaatattagattccgttgctaacctgagggtgagaatcggctcccgagctaaacgggagcttaccgaggcagagtacgacgcggccgtcgaatttcttatggattacgccgacaaggagcagccttcctgggctgacgttgcagagaaaatcggcgtacctggtaacaggctggtggcacccgtgttagaggacgtgcagcagaaaactgctccctatgataggtcttccgcggcatttgaaaaggcaatgggaaagaagaccgaagccagacagtggtgggaaagcactgatgatgaccaactgcggagtctcctgattgctttcctggtcgacgccaccaatgataccgaggaagcagcggcagaagccggacttagtgagttatataaatcatggcccgccgaggagagggaagcactctctaatatcgacttcgaaaagggaagagtggcctactcacaggaaaccttgagcaagttgtccgaatacatgcacgaataccgagttggcttgcatgaggccagaaaggctgtctttggggtcgacgatacatggcgcccaccacttgataaactggaagagcctacaggacagcctgctgtcgaccgcgttcttacaatactcaggcggttcgtgctggactgcgagcgccagtggggtcggcccagagccatcaccgtcgagcatacaaggactggattgatgggaccaacgcagcggcagaaaattcttaacgaacagaagaagaatcgggctgacaatgagcgtatccgcgacgaacttcgggaaagcggggtagataacccatcacgggcggaagttcggcgtcatttgatagtgcaagaacaggagtgccagtgtctgtattgtgggacaatgatcaccactaccactagtgaactggacgccatagtgccgcgggccggtggcggctcaagtaggcgtgagaacttggccgccgtctgtcgcgcttgtaatgccaagaagaaaagggagttattttatgcatgggccgggccggtgaagtcccaggagactatcgagagggtgagacagcttaaagccttcaaagactccaagaaagccaagatgtttaagaatcagatccgacgattaaatcagaccgaagcagatgaaccgatagacgagcgttctcttgcatccacttcatacgccgcagtcgctgtcagggagcggttagaacaacattttaacgagggtctggcacttgatgataaatcccgagtggtactggacgtgtatgccggcgctgtgacaagagagagtcgccgggcgggcgggatcgacgagcggattttattaaggggcgaacgggataagaaccgattcgacgttaggcaccatgcagtcgacgctgcagtgatgacactgcttaataggtccgtggcactgaccctggagcaacgtagccagctgcggcgcacattctatgaacagggactggacaagctggaccgcaatcaacttaagcctgaagaggactggagagatttcaccggcctggcccctgcatcccaggagaaattcttggagtggcggaaagctgccacaattctcggagacttgctggctgaggcaatagaagatgacagcattgcggttgtatcaccactccgccttagaccccagaacggatctgtgcaccttgaaaccatatccgctgtgaagaagcagacactcggttccgattggccagccgatgccgttaagagaatcgtggaccctgaaatttatcttgccatgaaagacgctctgggcaagctgaaggagctcccagaagactctgcacgaagcctggaactgccagatgggcgcttcgttgaagccgacgacgaagtcttgttcttccccgagaacgccgcatctattctgacacctcgcggggttgctgagattggtgggtcaatacaccacgcacggctctacggctggctgaccaagaagggagaactgaaggtagggatgcttagagtctacggggccgagttcccttggctgatgagggaaagtgggagccgaaacgttctgtccatgccaattcaccggggcagtcagtctttcagagatatgcaagatacaactaggaaggcggtggagagcggcgaagccgtcgagttcgcatggatcacacagaatgacgagctcgaatttgacccggatgactatatcgcccacggcggtaaggacgaactgcggcagttcctcgggttcatgccagagtgccggtggagagtcgatggctttaagaagaattatcagatcagaatcagaccagccatgctgtcacgagaacagctgccatccgatatacagaggcggctggagtctaaaacactgaccaagaatgaaagcttgctgctcaaggctcttgacacgggactcgtggttgcgatcggcggacttctcccattagaaaccttgaaggtgatacggcgaaacaatcttggatttcccagatggcgcggcaatggaaatcttccgacatcttttgaggtacgcagctccgctctccgagccctgggagtagaaggttctggcggcagcagcggcggctcaagcggaagtgaaacacctggaacttccgaaagcgctacgcctgaatcttctggtggatcttctggcggatcttccgcatgcactctgaacatcgaggacgaatacaggctccacgaaacttctaaggaacctgacgtgtccttgggatcaacttggttgtccgacttcccccaagcttgggccgagacaggcggaatgggtttggccgtgagacaggccccactcataatcccacttaaggcgacatccactccggtcagtatcaagcagtatccaatgtcccaggaagcacgcttaggaattaaaccacatattcaacgactcctggatcaaggtattctcgtcccatgtcaaagcccttggaatacccctcttctgcctgtgaagaagcccggcacaaacgactaccggcccgtgcaagacctcagggaagtgaataaacgagtcgaggatatacatccgactgtcccgaatccctataatctgctgtcaggtctgccaccaagtcatcaatggtatacagtactggacctgaaagacgcgttcttttgtttgcgactgcatcctacgtctcaaccgctgtttgcattcgaatggcgggaccccgaaatggggatttctgggcagctgacatggactcgtcttcctcaagggtttaagaactcccctacacttttcgacgaagccctgcatcgggatttagctgattttagaatccaacatcctgatctgattctcctgcaatatgttgacgatctgctcctcgctgcaaccagtgaacttgattgtcagcagggaacgagagctttactccagactctgggcaatcttggttaccgtgcttcagctaagaaggctcagatatgtcaaaagcaagtgaaataccttggttacctgttgaaggaagggcaacgctggttaaccgaagctcgcaaggaaacagtaatgggccaacccacacccaaaacaccccgccagctgagagaatttctcggtacagctggattttgcagactgtggattcccggtttcgccgagatggccgcacctctttatccactgacgaagactggtaccctcttcaactggggacccgatcagcagaaagcttaccaggagattaaacaggcactgctgaccgctcccgcgctcggcctgcccgacctgacgaaaccattcgagcttttcgtggatgagaaacaaggatatgctaagggagtgctgactcagaagcttgggccgtggcgacgcccagtagcttatctcagcaagaaactggatcctgtggccgccggttggccgccatgtttgagaatggttgccgctatcgcagtcctcaccaaagacgccggtaaactgacaatggggcaacctctggtgatcctcgctccgcacgctgtggaagccttagtgaagcagccacctgataggtggttaagcaatgcgagaatgacccattaccaagcgttattgctggataccgatagagtgcaatttggccccgttgtcgctctcaatcccgcgactcttctgcccttaccagaagagggacttcagcataattgtttggacattctcgcagaggctcatggcactcggccagatctcaccgatcaaccccttcctgatgctgatcatacttggtatactgacggctcatccctgctgcaggaaggccaaagaaaagccggcgccgctgtcacaacagaaactgaagtgatttgggccaaggcactccctgcaggaactagcgcccaaagagccgagctcatcgcccttactcaagctctcaaaatggccgagggcaagaaacttaacgtgtacacagactccaggtacgccttcgccacagcacacattcacggcgagatctatcgccgaaggggacttctgacgagtgagggaaaggaaattaagaacaaggatgaaatactggcgctgctgaaggctctgtttctccctaagcggctgtccattattcactgccctggtcaccagaaagggcattccgctgaagccaggggcaataggatggcagatcaggctgcaaggaaagctgcaattaccgaaacgcccgatacgagcacacttcttatcgagaactcttccccttcaggcggtagcaagcggacagcagatggatccgagtttgaacctaggggcggcggaggcagctacccctatgatgtacctgattatgcttctggcggacccaagaagaagaggaaagtcggtggttctcctaagaaaaagagaaaggtcggatccggcgccaccaattttagccttttaaagcaggctggcgacgttgaggaaaacccggggcccatggaccaagccaaacccctgagccaagaggagtctacactgatcgagcgggccaccgcaaccattaatagtattccaattagtgaggattattctgtggcatccgccgcattatccagtgatgggcgtattttcaccggcgttaacgtgtaccacttcaccggcggcccctgcgcagagctggtcgttttgggtacagcagcagcagcagccgccgggaatctcacctgcattgtggcaataggcaacgaaaatcggggaattttatcaccgtgtggtcgttgtcgccaagttctgcttgacctgcaccccggcattaaggcaatcgttaaagattccgacggccaacccacagctgtcggcatacgagagttacttccaagcggatacgtttgggaaggatagggatccgcaggcctct

SEQ ID NO: 961 - DNA, 6183 bp, synthetic construct
  source 1..6183: mol_type = other DNA; note = MMLV1_cloned_into_tethered_MG3-6(H586A)plasmid
atgcctaagaagaaacgaaaggttactctgaacatcgaggacgaatacaggctccacgaaacttctaaggaacctgacgtgtccttgggatcaacttggttgtccgacttcccccaagcttgggccgagacaggcggaatgggtttggccgtgagacaggccccactcataatcccacttaaggcgacatccactccggtcagtatcaagcagtatccaatgtcccaggaagcacgcttaggaattaaaccacatattcaacgactcctggatcaaggtattctcgtcccatgtcaaagcccttggaatacccctcttctgcctgtgaagaagcccggcacaaacgactaccggcccgtgcaagacctcagggaagtgaataaacgagtcgaggatatacatccgactgtcccgaatccctataatctgctgtcaggtctgccaccaagtcatcaatggtatacagtactggacctgaaagacgcgttcttttgtttgcgactgcatcctacgtctcaaccgctgtttgcattcgaatggcgggaccccgaaatggggatttctgggcagctgacatggactcgtcttcctcaagggtttaagaactcccctacacttttcgacgaagccctgcatcgggatttagctgattttagaatccaacatcctgatctgattctcctgcaatatgttgacgatctgctcctcgctgcaaccagtgaacttgattgtcagcagggaacgagagctttactccagactctgggcaatcttggttaccgtgcttcagctaagaaggctcagatatgtcaaaagcaagtgaaataccttggttacctgttgaaggaagggcaacgctggttaaccgaagctcgcaaggaaacagtaatgggccaacccacacccaaaacaccccgccagctgagagaatttctcggtacagctggattttgcagactgtggattcccggtttcgccgagatggccgcacctctttatccactgacgaagactggtaccctcttcaactggggacccgatcagcagaaagcttaccaggagattaaacaggcactgctgaccgctcccgcgctcggcctgcccgacctgacgaaaccattcgagcttttcgtggatgagaaacaaggatatgctaagggagtgctgactcagaagcttgggccgtggcgacgcccagtagcttatctcagcaagaaactggatcctgtggccgccggttggccgccatgtttgagaatggttgccgctatcgcagtcctcaccaaagacgccggtaaactgacaatggggcaacctctggtgatcctcgctccgcacgctgtggaagccttagtgaagcagccacctgataggtggttaagcaatgcgagaatgacccattaccaagcgttattgctggataccgatagagtgcaatttggccccgttgtcgctctcaatcccgcgactcttctgcccttaccagaagagggacttcagcataattgtttggacattctcgcagaggctcatggcactcggccagatctcaccgatcaaccccttcctgatgctgatcatacttggtatactgacggctcatccctgctgcaggaaggccaaagaaaagccggcgccgctgtcacaacagaaactgaagtgatttgggccaaggcactccctgcaggaactagcgcccaaagagccgagctcatcgcccttactcaagctctcaaaatggccgagggcaagaaacttaacgtgtacacagactccaggtacgccttcgccacagcacacattcacggcgagatctatcgccgaaggggacttctgacgagtgagggaaaggaaattaagaacaaggatgaaatactggcgctgctgaaggctctgtttctccctaagcggctgtccattattcactgccctggtcaccagaaagggcattccgctgaagccaggggcaataggatggcagatcaggctgcaaggaaagctgcaattaccgaaacgcccgatacgagcacacttcttatcgagaactcttccccttcaggcggtagcaagcggacagcagatggatccgagtttgaatctggcggcagcagcggcggctcaagcggaagtgaaacacctggaacttccgaaagcgctacgcctgaatcttctggtggatcttctggcggatcttccgcatgcatgtcaacggacatgaagaactatcgtatcggggtcgacgtgggtgatcgaagcgtaggcctcgcagcgattgaatttgacgatgacggactgcctatacagaaactcgcattagtcaccttccgtcacgatggtggtctggatcctactaagaacaagacccctatgagtcgcaaggagacgcggggaatagccaggagaaccatgcgaatgaacagagagcggaaaagacggctccgtaacctggacaatgttttagaaaacttgggctactcagtcccggaaggaccagaacctgagacatatgaagcctggacctctcgggctcttctggcatccattaagctcgcaagtgccgatgagctgaatgaacatttggttagagcggtcagacatatggctcgacacaggggatgggccaatccgtggtggtctttagatcagctcgaaaaggctagtcaggagccaagcgagacattcgagatcatcctggcacgcgctagggagctgttcggagaaaaggtgcccgctaaccctacattaggtatgctgggcgccttagcggctaacaatgaggtactgcttcgacccagggacgagaagaaacgaaagaccggctacgtgagaggtacacccttaatgttcgcgcaggtcaggcagggagatcagctcgcggagctccgtcgaatctgcgaagttcaagggatcgaagatcaatatgaagctctgagattaggggtgttcgatcacaagcacccttacgtccctaaggaacgcgtcggaaaagacccactgaatccgagcacgaaccggaccatccgggctagtttggagttccaggaatttagaatattagattccgttgctaacctgagggtgagaatcggctcccgagctaaacgggagcttaccgaggcagagtacgacgcggccgtcgaatttcttatggattacgccgacaaggagcagccttcctgggctgacgttgcagagaaaatcggcgtacctggtaacaggctggtggcacccgtgttagaggacgtgcagcagaaaactgctccctatgataggtcttccgcggcatttgaaaaggcaatgggaaagaagaccgaagccagacagtggtgggaaagcactgatgatgaccaactgcggagtctcctgattgctttcctggtcgacgccaccaatgataccgaggaagcagcggcagaagccggacttagtgagttatataaatcatggcccgccgaggagagggaagcactctctaatatcgacttcgaaaagggaagagtggcctactcacaggaaaccttgagcaagttgtccgaatacatgcacgaataccgagttggcttgcatgaggccagaaaggctgtctttggggtcgacgatacatggcgcccaccacttgataaactggaagagcctacaggacagcctgctgtcgaccgcgttcttacaatactcaggcggttcgtgctggactgcgagcgccagtggggtcggcccagagccatcaccgtcgagcatacaaggactggattgatgggaccaacgcagcggcagaaaattcttaacgaacagaagaagaatcgggctgacaatgagcgtatccgcgacgaacttcgggaaagcggggtagataacccatcacgggcggaagttcggcgtcatttgatagtgcaagaacaggagtgccagtgtctgtattgtgggacaatgatcaccactaccactagtgaactggacgccatagtgccgcgggccggtggcggctcaagtaggcgtgagaacttggccgccgtctgtcgcgcttgtaatgccaagaagaaaagggagttattttatgcatgggccgggccggtgaagtcccaggagactatcgagagggtgagacagcttaaagccttcaaagactccaagaaagccaagatgtttaagaatcagatccgacgattaaatcagaccgaagcagatgaaccgatagacgagcgttctcttgcatccacttcatacgccgcagtcgctgtcagggagcggttagaacaacattttaacgagggtctggcacttgatgataaatcccgagtggtactggacgtgtatgccggcgctgtgacaagagagagtcgccgggcgggcgggatcgacgagcggattttattaaggggcgaacgggataagaaccgattcgacgttaggcaccatgcagtcgacgctgcagtgatgacactgcttaataggtccgtggcactgaccctggagcaacgtagccagctgcggcgcacattctatgaacagggactggacaagctggaccgcaatcaacttaagcctgaagaggactggagagatttcaccggcctggcccctgcatcccaggagaaattcttggagtggcggaaagctgccacaattctcggagacttgctggctgaggcaatagaagatgacagcattgcggttgtatcaccactccgccttagaccccagaacggatctgtgcaccttgaaaccatatccgctgtgaagaagcagacactcggttccgattggccagccgatgccgttaagagaatcgtggaccctgaaatttatcttgccatgaaagacgctctgggcaagctgaaggagctcccagaagactctgcacgaagcctggaactgccagatgggcgcttcgttgaagccgacgacgaagtcttgttcttccccgagaacgccgcatctattctgacacctcgcggggttgctgagattggtgggtcaatacaccacgcacggctctacggctggctgaccaagaagggagaactgaaggtagggatgcttagagtctacggggccgagttcccttggctgatgagggaaagtgggagccgaaacgttctgtccatgccaattcaccggggcagtcagtctttcagagatatgcaagatacaactaggaaggcggtggagagcggcgaagccgtcgagttcgcatggatcacacagaatgacgagctcgaatttgacccggatgactatatcgcccacggcggtaaggacgaactgcggcagttcctcgggttcatgccagagtgccggtggagagtcgatggctttaagaagaattatcagatcagaatcagaccagccatgctgtcacgagaacagctgccatccgatatacagaggcggctggagtctaaaacactgaccaagaatgaaagcttgctgctcaaggctcttgacacgggactcgtggttgcgatcggcggacttctcccattagaaaccttgaaggtgatacggcgaaacaatcttggatttcccagatggcgcggcaatggaaatcttccgacatcttttgaggtacgcagctccgctctccgagccctgggagtagaaggtcctaggggcggcggaggcagctacccctatgatgtacctgattatgcttctggcggacccaagaagaagaggaaagtcggtggttctcctaagaaaaagagaaaggtcggatccggcgccaccaattttagccttttaaagcaggctggcgacgttgaggaaaacccggggcccatggaccaagccaaacccctgagccaagaggagtctacactgatcgagcgggccaccgcaaccattaatagtattccaattagtgaggattattctgtggcatccgccgcattatccagtgatgggcgtattttcaccggcgttaacgtgtaccacttcaccggcggcccctgcgcagagctggtcgttttgggtacagcagcagcagcagccgccgggaatctcacctgcattgtggcaataggcaacgaaaatcggggaattttatcaccgtgtggtcgttgtcgccaagttctgcttgacctgcaccccggcattaaggcaatcgttaaagattccgacggccaacccacagctgtcggcatacgagagttacttccaagcggatacgtttgggaaggatag

SEQ ID NO: 962 - DNA, 6199 bp, synthetic construct
  source 1..6199: mol_type = other DNA; note = MMLV2_cloned_into_tethered_MG3-6(H586A)plasmid
atgcctaagaagaaacgaaaggttatgtcaacggacatgaagaactatcgtatcggggtcgacgtgggtgatcgaagcgtaggcctcgcagcgattgaatttgacgatgacggactgcctatacagaaactcgcattagtcaccttccgtcacgatggtggtctggatcctactaagaacaagacccctatgagtcgcaaggagacgcggggaatagccaggagaaccatgcgaatgaacagagagcggaaaagacggctccgtaacctggacaatgttttagaaaacttgggctactcagtcccggaaggaccagaacctgagacatatgaagcctggacctctcgggctcttctggcatccattaagctcgcaagtgccgatgagctgaatgaacatttggttagagcggtcagacatatggctcgacacaggggatgggccaatccgtggtggtctttagatcagctcgaaaaggctagtcaggagccaagcgagacattcgagatcatcctggcacgcgctagggagctgttcggagaaaaggtgcccgctaaccctacattaggtatgctgggcgccttagcggctaacaatgaggtactgcttcgacccagggacgagaagaaacgaaagaccggctacgtgagaggtacacccttaatgttcgcgcaggtcaggcagggagatcagctcgcggagctccgtcgaatctgcgaagttcaagggatcgaagatcaatatgaagctctgagattaggggtgttcgatcacaagcacccttacgtccctaaggaacgcgtcggaaaagacccactgaatccgagcacgaaccggaccatccgggctagtttggagttccaggaatttagaatattagattccgttgctaacctgagggtgagaatcggctcccgagctaaacgggagcttaccgaggcagagtacgacgcggccgtcgaatttcttatggattacgccgacaaggagcagccttcctgggctgacgttgcagagaaaatcggcgtacctggtaacaggctggtggcacccgtgttagaggacgtgcagcagaaaactgctccctatgataggtcttccgcggcatttgaaaaggcaatgggaaagaagaccgaagccagacagtggtgggaaagcactgatgatgaccaactgcggagtctcctgattgctttcctggtcgacgccaccaatgataccgaggaagcagcggcagaagccggacttagtgagttatataaatcatggcccgccgaggagagggaagcactctctaatatcgacttcgaaaagggaagagtggcctactcacaggaaaccttgagcaagttgtccgaatacatgcacgaataccgagttggcttgcatgaggccagaaaggctgtctttggggtcgacgatacatggcgcccaccacttgataaactggaagagcctacaggacagcctgctgtcgaccgcgttcttacaatactcaggcggttcgtgctggactgcgagcgccagtggggtcggcccagagccatcaccgtcgagcatacaaggactggattgatgggaccaacgcagcggcagaaaattcttaacgaacagaagaagaatcgggctgacaatgagcgtatccgcgacgaacttcgggaaagcggggtagataacccatcacgggcggaagttcggcgtcatttgatagtgcaagaacaggagtgccagtgtctgtattgtgggacaatgatcaccactaccactagtgaactggacgccatagtgccgcgggccggtggcggctcaagtaggcgtgagaacttggccgccgtctgtcgcgcttgtaatgccaagaagaaaagggagttattttatgcatgggccgggccggtgaagtcccaggagactatcgagagggtgagacagcttaaagccttcaaagactccaagaaagccaagatgtttaagaatcagatccgacgattaaatcagaccgaagcagatgaaccgatagacgagcgttctcttgcatccacttcatacgccgcagtcgctgtcagggagcggttagaacaacattttaacgagggtctggcacttgatgataaatcccgagtggtactggacgtgtatgccggcgctgtgacaagagagagtcgccgggcgggcgggatcgacgagcggattttattaaggggcgaacgggataagaaccgattcgacgttaggcaccatgcagtcgacgctgcagtgatgacactgcttaataggtccgtggcactgaccctggagcaacgtagccagctgcggcgcacattctatgaacagggactggacaagctggaccgcaatcaacttaagcctgaagaggactggagagatttcaccggcctggcccctgcatcccaggagaaattcttggagtggcggaaagctgccacaattctcggagacttgctggctgaggcaatagaagatgacagcattgcggttgtatcaccactccgccttagaccccagaacggatctgtgcaccttgaaaccatatccgctgtgaagaagcagacactcggttccgattggccagccgatgccgttaagagaatcgtggaccctgaaatttatcttgccatgaaagacgctctgggcaagctgaaggagctcccagaagactctgcacgaagcctggaactgccagatgggcgcttcgttgaagccgacgacgaagtcttgttcttccccgagaacgccgcatctattctgacacctcgcggggttgctgagattggtgggtcaatacaccacgcacggctctacggctggctgaccaagaagggagaactgaaggtagggatgcttagagtctacggggccgagttcccttggctgatgagggaaagtgggagccgaaacgttctgtccatgccaattcaccggggcagtcagtctttcagagatatgcaagatacaactaggaaggcggtggagagcggcgaagccgtcgagttcgcatggatcacacagaatgacgagctcgaatttgacccggatgactatatcgcccacggcggtaaggacgaactgcggcagttcctcgggttcatgccagagtgccggtggagagtcgatggctttaagaagaattatcagatcagaatcagaccagccatgctgtcacgagaacagctgccatccgatatacagaggcggctggagtctaaaacactgaccaagaatgaaagcttgctgctcaaggctcttgacacgggactcgtggttgcgatcggcggacttctcccattagaaaccttgaaggtgatacggcgaaacaatcttggatttcccagatggcgcggcaatggaaatcttccgacatcttttgaggtacgcagctccgctctccgagccctgggagtagaaggttctggcggcagcagcggcggctcaagcggaagtgaaacacctggaacttccgaaagcgctacgcctgaatcttctggtggatcttctggcggatcttccgcatgcactctgaacatcgaggacgaatacaggctccacgaaacttctaaggaacctgacgtgtccttgggatcaacttggttgtccgacttcccccaagcttgggccgagacaggcggaatgggtttggccgtgagacaggccccactcataatcccacttaaggcgacatccactccggtcagtatcaagcagtatccaatgtcccaggaagcacgcttaggaattaaaccacatattcaacgactcctggatcaaggtattctcgtcccatgtcaaagcccttggaatacccctcttctgcctgtgaagaagcccggcacaaacgactaccggcccgtgcaagacctcagggaagtgaataaacgagtcgaggatatacatccgactgtcccgaatccctataatctgctgtcaggtctgccaccaagtcatcaatggtatacagtactggacctgaaagacgcgttcttttgtttgcgactgcatcctacgtctcaaccgctgtttgcattcgaatggcgggaccccgaaatggggatttctgggcagctgacatggactcgtcttcctcaagggtttaagaactcccctacacttttcaacgaagccctgcatcgggatttagctgattttagaatccaacatcctgatctgattctcctgcaatatgttgacgatctgctcctcgctgcaaccagtgaacttgattgtcagcagggaacgagagctttactccagactctgggcaatcttggttaccgtgcttcagctaagaaggctcagatatgtcaaaagcaagtgaaataccttggttacctgttgaaggaagggcaacgctggttaaccgaagctcgcaaggaaacagtaatgggccaacccacacccaaaacaccccgccagctgagagaatttctcggtaaggctggattttgcagactgttcattcccggtttcgccgagatggccgcacctctttatccactgacgaagcccggtaccctcttcaactggggacccgatcagcagaaagcttaccaggagattaaacaggcactgctgaccgctcccgcgctcggcctgcccgacctgacgaaaccattcgagcttttcgtggatgagaaacaaggatatgctaagggagtgctgactcagaagcttgggccgtggcgacgcccagtagcttatctcagcaagaaactggatcctgtggccgccggttggccgccatgtttgagaatggttgccgctatcgcagtcctcaccaaagacgccggtaaactgacaatggggcaacctctggtgatcctcgctccgcacgctgtggaagccttagtgaagcagccacctgataggtggttaagcaatgcgagaatgacccattaccaagcgttattgctggataccgatagagtgcaatttggccccgttgtcgctctcaatcccgcgactcttctgcccttaccagaagagggacttcagcataattgtttggacattctcgcagaggctcatggcactcggccagatctcaccgatcaaccccttcctgatgctgatcatacttggtatactgacggctcatccctgctgcaggaaggccaaagaaaagccggcgccgctgtcacaacagaaactgaagtgatttgggccaaggcactccctgcaggaactagcgcccaaagagccgagctcatcgcccttactcaagctctcaaaatggccgagggcaagaaacttaacgtgtacacagactccaggtacgccttcgccacagcacacattcacggcgagatctatcgccgaaggggatggctgacgagtgagggaaaggaaattaagaacaaggatgaaatactggcgctgctgaaggctctgtttctccctaagcggctgtccattattcactgccctggtcaccagaaagggcattccgctgaagccaggggcaataggatggcagatcaggctgcaaggaaagctgcaattaccgaaacgcccgatacgagcacacttcttatcgagaactcttccccttcaggcggtagcaagcggacagcagatggatccgagtttgaacctaggggcggcggaggcagctacccctatgatgtacctgattatgcttctggcggacccaagaagaagaggaaagtcggtggttctcctaagaaaaagagaaaggtcggatccggcgccaccaattttagccttttaaagcaggctggcgacgttgaggaaaacccggggcccatggaccaagccaaacccctgagccaagaggagtctacactgatcgagcgggccaccgcaaccattaatagtattccaattagtgaggattattctgtggcatccgccgcattatccagtgatgggcgtattttcaccggcgttaacgtgtaccacttcaccggcggcccctgcgcagagctggtcgttttgggtacagcagcagcagcagccgccgggaatctcacctgcattgtggcaataggcaacgaaaatcggggaattttatcaccgtgtggtcgttgtcgccaagttctgcttgacctgcaccccggcattaaggcaatcgttaaagattccgacggccaacccacagctgtcggcatacgagagttacttccaagcggatacgtttgggaaggatagggatccgcaggcctct

SEQ ID NO: 963 - DNA, 6183 bp, synthetic construct
  source 1..6183: mol_type = other DNA; note = MMLV2_cloned_into_tethered_MG3-6(H586A)plasmid
atgcctaagaagaaacgaaaggttactctgaacatcgaggacgaatacaggctccacgaaacttctaaggaacctgacgtgtccttgggatcaacttggttgtccgacttcccccaagcttgggccgagacaggcggaatgggtttggccgtgagacaggccccactcataatcccacttaaggcgacatccactccggtcagtatcaagcagtatccaatgtcccaggaagcacgcttaggaattaaaccacatattcaacgactcctggatcaaggtattctcgtcccatgtcaaagcccttggaatacccctcttctgcctgtgaagaagcccggcacaaacgactaccggcccgtgcaagacctcagggaagtgaataaacgagtcgaggatatacatccgactgtcccgaatccctataatctgctgtcaggtctgccaccaagtcatcaatggtatacagtactggacctgaaagacgcgttcttttgtttgcgactgcatcctacgtctcaaccgctgtttgcattcgaatggcgggaccccgaaatggggatttctgggcagctgacatggactcgtcttcctcaagggtttaagaactcccctacacttttcaacgaagccctgcatcgggatttagctgattttagaatccaacatcctgatctgattctcctgcaatatgttgacgatctgctcctcgctgcaaccagtgaacttgattgtcagcagggaacgagagctttactccagactctgggcaatcttggttaccgtgcttcagctaagaaggctcagatatgtcaaaagcaagtgaaataccttggttacctgttgaaggaagggcaacgctggttaaccgaagctcgcaaggaaacagtaatgggccaacccacacccaaaacaccccgccagctgagagaatttctcggtaaggctggattttgcagactgttcattcccggtttcgccgagatggccgcacctctttatccactgacgaagcccggtaccctcttcaactggggacccgatcagcagaaagcttaccaggagattaaacaggcactgctgaccgctcccgcgctcggcctgcccgacctgacgaaaccattcgagcttttcgtggatgagaaacaaggatatgctaagggagtgctgactcagaagcttgggccgtggcgacgcccagtagcttatctcagcaagaaactggatcctgtggccgccggttggccgccatgtttgagaatggttgccgctatcgcagtcctcaccaaagacgccggtaaactgacaatggggcaacctctggtgatcctcgctccgcacgctgtggaagccttagtgaagcagccacctgataggtggttaagcaatgcgagaatgacccattaccaagcgttattgctggataccgatagagtgcaatttggccccgttgtcgctctcaatcccgcgactcttctgcccttaccagaagagggacttcagcataattgtttggacattctcgcagaggctcatggcactcggccagatctcaccgatcaaccccttcctgatgctgatcatacttggtatactgacggctcatccctgctgcaggaaggccaaagaaaagccggcgccgctgtcacaacagaaactgaagtgatttgggccaaggcactccctgcaggaactagcgcccaaagagccgagctcatcgcccttactcaagctctcaaaatggccgagggcaagaaacttaacgtgtacacagactccaggtacgccttcgccacagcacacattcacggcgagatctatcgccgaaggggatggctgacgagtgagggaaaggaaattaagaacaaggatgaaatactggcgctgctgaaggctctgtttctccctaagcggctgtccattattcactgccctggtcaccagaaagggcattccgctgaagccaggggcaataggatggcagatcaggctgcaaggaaagctgcaattaccgaaacgcccgatacgagcacacttcttatcgagaactcttccccttcaggcggtagcaagcggacagcagatggatccgagtttgaatctggcggcagcagcggcggctcaagcggaagtgaaacacctggaacttccgaaagcgctacgcctgaatcttctggtggatcttctggcggatcttccgcatgcatgtcaacggacatgaagaactatcgtatcggggtcgacgtgggtgatcgaagcgtaggcctcgcagcgattgaatttgacgatgacggactgcctatacagaaactcgcattagtcaccttccgtcacgatggtggtctggatcctactaagaacaagacccctatgagtcgcaaggagacgcggggaatagccaggagaaccatgcgaatgaacagagagcggaaaagacggctccgtaacctggacaatgttttagaaaacttgggctactcagtcccggaaggaccagaacctgagacatatgaagcctggacctctcgggctcttctggcatccattaagctcgcaagtgccgatgagctgaatgaacatttggttagagcggtcagacatatggctcgacacaggggatgggccaatccgtggtggtctttagatcagctcgaaaaggctagtcaggagccaagcgagacattcgagatcatcctggcacgcgctagggagctgttcggagaaaaggtgcccgctaaccctacattaggtatgctgggcgccttagcggctaacaatgaggtactgcttcgacccagggacgagaagaaacgaaagaccggctacgtgagaggtacacccttaatgttcgcgcaggtcaggcagggagatcagctcgcggagctccgtcgaatctgcgaagttcaagggatcgaagatcaatatgaagctctgagattaggggtgttcgatcacaagcacccttacgtccctaaggaacgcgtcggaaaagacccactgaatccgagcacgaaccggaccatccgggctagtttggagttccaggaatttagaatattagattccgttgctaacctgagggtgagaatcggctcccgagctaaacgggagcttaccgaggcagagtacgacgcggccgtcgaatttcttatggattacgccgacaaggagcagccttcctgggctgacgttgcagagaaaatcggcgtacctggtaacaggctggtggcacccgtgttagaggacgtgcagcagaaaactgctccctatgataggtcttccgcggcatttgaaaaggcaatgggaaagaagaccgaagccagacagtggtgggaaagcactgatgatgaccaactgcggagtctcctgattgctttcctggtcgacgccaccaatgataccgaggaagcagcggcagaagccggacttagtgagttatataaatcatggcccgccgaggagagggaagcactctctaatatcgacttcgaaaagggaagagtggcctactcacaggaaaccttgagcaagttgtccgaatacatgcacgaataccgagttggcttgcatgaggccagaaaggctgtctttggggtcgacgatacatggcgcccaccacttgataaactggaagagcctacaggacagcctgctgtcgaccgcgttcttacaatactcaggcggttcgtgctggactgcgagcgccagtggggtcggcccagagccatcaccgtcgagcatacaaggactggattgatgggaccaacgcagcggcagaaaattcttaacgaacagaagaagaatcgggctgacaatgagcgtatccgcgacgaacttcgggaaagcggggtagataacccatcacgggcggaagttcggcgtcatttgatagtgcaagaacaggagtgccagtgtctgtattgtgggacaatgatcaccactaccactagtgaactggacgccatagtgccgcgggccggtggcggctcaagtaggcgtgagaacttggccgccgtctgtcgcgcttgtaatgccaagaagaaaagggagttattttatgcatgggccgggccggtgaagtcccaggagactatcgagagggtgagacagcttaaagccttcaaagactccaagaaagccaagatgtttaagaatcagatccgacgattaaatcagaccgaagcagatgaaccgatagacgagcgttctcttgcatccacttcatacgccgcagtcgctgtcagggagcggttagaacaacattttaacgagggtctggcacttgatgataaatcccgagtggtactggacgtgtatgccggcgctgtgacaagagagagtcgccgggcgggcgggatcgacgagcggattttattaaggggcgaacgggataagaaccgattcgacgttaggcaccatgcagtcgacgctgcagtgatgacactgcttaataggtccgtggcactgaccctggagcaacgtagccagctgcggcgcacattctatgaacagggactggacaagctggaccgcaatcaacttaagcctgaagaggactggagagatttcaccggcctggcccctgcatcccaggagaaattcttggagtggcggaaagctgccacaattctcggagacttgctggctgaggcaatagaagatgacagcattgcggttgtatcaccactccgccttagaccccagaacggatctgtgcaccttgaaaccatatccgctgtgaagaagcagacactcggttccgattggccagccgatgccgttaagagaatcgtggaccctgaaatttatcttgccatgaaagacgctctgggcaagctgaaggagctcccagaagactctgcacgaagcctggaactgccagatgggcgcttcgttgaagccgacgacgaagtcttgttcttccccgagaacgccgcatctattctgacacctcgcggggttgctgagattggtgggtcaatacaccacgcacggctctacggctggctgaccaagaagggagaactgaaggtagggatgcttagagtctacggggccgagttcccttggctgatgagggaaagtgggagccgaaacgttctgtccatgccaattcaccggggcagtcagtctttcagagatatgcaagatacaactaggaaggcggtggagagcggcgaagccgtcgagttcgcatggatcacacagaatgacgagctcgaatttgacccggatgactatatcgcccacggcggtaaggacgaactgcggcagttcctcgggttcatgccagagtgccggtggagagtcgatggctttaagaagaattatcagatcagaatcagaccagccatgctgtcacgagaacagctgccatccgatatacagaggcggctggagtctaaaacactgaccaagaatgaaagcttgctgctcaaggctcttgacacgggactcgtggttgcgatcggcggacttctcccattagaaaccttgaaggtgatacggcgaaacaatcttggatttcccagatggcgcggcaatggaaatcttccgacatcttttgaggtacgcagctccgctctccgagccctgggagtagaaggtcctaggggcggcggaggcagctacccctatgatgtacctgattatgcttctggcggacccaagaagaagaggaaagtcggtggttctcctaagaaaaagagaaaggtcggatccggcgccaccaattttagccttttaaagcaggctggcgacgttgaggaaaacccggggcccatggaccaagccaaacccctgagccaagaggagtctacactgatcgagcgggccaccgcaaccattaatagtattccaattagtgaggattattctgtggcatccgccgcattatccagtgatgggcgtattttcaccggcgttaacgtgtaccacttcaccggcggcccctgcgcagagctggtcgttttgggtacagcagcagcagcagccgccgggaatctcacctgcattgtggcaataggcaacgaaaatcggggaattttatcaccgtgtggtcgttgtcgccaagttctgcttgacctgcaccccggcattaaggcaatcgttaaagattccgacggccaacccacagctgtcggcatacgagagttacttccaagcggatacgtttgggaaggatag

SEQ ID NO: 964 - DNA, 2244 bp, synthetic construct
  source 1..2244: mol_type = other DNA; note = MG151-118_cloned_into_untethered_plasmid
gctagcgccaccatgtacccctatgatgtacctgattatgcttctggcggcagcagcggcggctcaagcggaagtgaaacacctggaacttccgaaagcgctacgcctgaatcttctggtggatcttctggcggatcttccgcatgcacagtgacactcgaagatgagtacaggctccatcaagaacagaaacctccagaccaggaaatcgactcttggctgcaacggtttcccgaagcttgggccgagaccggtgggctgggcctggccaaacaccgacccgccattttcgtcgaagtgaagcccggcacggacccagttcgggtacggcagtacccaatgccgctgcgagcccgcgaggggataacccctcacataaggcggctccttgaccaaggagtgttgagagcttgccactcaagttggaatacacccctcttgcccgtacacaaacccaactcaacggactatagacccgttcaggacttgcgagaggtgaataaaagagtgatggacatccaccctacagtcccaaacccttacacacttctttctgcactgcatccagagaagcagtggtatacagtcctggatttgaaagacgcattcttttccctccctctggccccaaagagtcaggggctgtttgcatttcagtggacagatcctgagagaggtatcaatggtcagttgacttggactaggctgccccagggcttcaaaaactctcctactctgttcgatgaggctctccatgaggacctgggcgaataccgccgacaacacccagagataaccctgctgcaatatgtagatgatttgttgatcgctgccaggtcccctgagacatgtgtgcagggaactgaagacttgctgaagactctcggtgagctgggatatagagcatcagccactaaggcccagatctgcaagtctgaagtgacctatctcggctacttgttgaaagggggacagcgctggcttacaaaggcaaggaaggagaccgtgttgagaatcccaagaccccagagcactcggcaggttcgcgagtttttgggcagtgcagggttttgcaggctctggatccctggcttcgccgagcttgctaaaccattgtaccaagctaccaaggaacgccagcctttcaattggactgaggaagccgagttggctttccagcagattaaaacaagcctcctcagcgcacccgctctgggtctgccggatgtctcaaaaccttttcatctttatgtggacgagagcaaaggtgtggcaaaggctgtgttgacccaatatctggggccctggcaacggccggtggcatacctgtccaagaaactcgatagtgtggccgctggatggccaccttgcttgcagattattgcagccaccgcattgatggttagggacgccgataagctgatcatgggacaagagctgcgagtcatcacaccccatgctatagaaggagtccttcagcagcctcccgatcgatggatgagcaatgctcgcttgacccactatcaggggttgttgctgaatccactgagaatcacttttcttccacctacgtccctgaaccccgcttccctgcttccaaaccccgatctggatgctcccagccacgagtgtacggaaattttggctcaggtccacggagtgagggaggatctccaggatcggcttctcccagataccgaacttatttggtttaccgacggctcatcctacgttcatcaaggacagagatacgccggcgctgctgtgacatctgaaacagaagtaatttgggcagaaccattgccccctggcaccagtgcacaacgggctgaattgatcgcactgacgcaggcccttaccttgggcgccgagaagaagctgaccgtttataccgacagcaggtacgccttcgcaacagcacatattcacggggctatttaccgcgagaggggtctgctgactgccgaaggcaaggagattaaaaacaaacaggaaatcctggcccttctgaccgccctctggaagcctaaaaagctggccatagttcattgtccgagacaccagaaaccaactacaccaatcgctcgggggaatttcctcgccgaccagactgccaagtctattgcaaaggccccgtcccagctgcttgtccttcaactccctgacccgggacctcagcctaggcctaagaagaaaagaaaggtgggtggttctcctaagaaaaagagaaaggtctgagaattc

SEQ ID NO: 965 - DNA, 2070 bp, synthetic construct
  source 1..2070: mol_type = other DNA; note = MG151-119_cloned_into_untethered_plasmid
gctagcgccaccatgtacccctatgatgtacctgattatgcttctggcggcagcagcggcggctcaagcggaagtgaaacacctggaacttccgaaagcgctacgcctgaatcttctggtggatcttctggcggatcttccgcatgctctattagagcagtgcaggccattatccggggccacgccgagatcgaacccatttgcctgccccaaccgcgacgaatcaccaacacaaaacagtataggctgccaggaggccagcaggagattaccaagactgtgcaggagcttgaaagagtgggcatcatccgcccagcccatagtccttacaactctcccatctggcctgtgcggaaacccgatgggacctggcgaatgacagttgattatcgggaacttaataaagtgactcctcccattcacgccgcagttcccaatatcgcttcactgatggatacattgagcagggaaattgaaacttatcactgcgtcctggacctggccaatgcattcttctccataccgatcgcgaaagagtctcaggaccaatttgcttttacatgggaaggcaggcagtggacttttcaggtactgccccagggttacgtccacagtcccacattctgtcacaaccttgtggcccgagatctggcgaattggaacaaaccaagcacagtcaagatgttccactatatcgacgacctgatgctcactagcgacagtatcgaggctctcgaaaagaccgtgccaagcctgattacctacctccaggaaaaagagtgggccatcaacccacagaaggttcagggaccagggttgagcgtgaaatttctgggcgtcgtgtggagcggcaagactaaggtgctgccttccgctatcattgataagatccaggcattccctgtaccgaccaagcctaaacagttgcaggaatttttgggcatcctgggctactggaggtccttcattccacatctggcacagctgctcaaacctttgtacagacttactaaaaagggccaggtgtgggattgggggagaaccgaacaggaggctttccagcaggctaagattgccgttaagcaagcacaagcgttgggcatttttgaccctacactccccgctgaactcgatgtacatgtcacccaggaagggttcggatggggtttgtggcagagacagggaagtgtccggattcctatcgggttctggagccaaatctggcacggagccgaggagcgctactccatggtggaaaagcagctcctggctacctattcagccttgcaagctgtagagcctattacccaaacagcagaggtgattgtgaagaccacccttccgattcaagggtgggtgaaggatcttacacatataccaaaaacgggagtcgcgcagtctcaaacggtcgccaggtgggtagcatatctttcacagcgcagcaggctgagtagctctccactcaaagaggagttgcagaagatcctcggtcccgttacataccattctgagactccagaggaaatagtggttacctgccccgagaaaagcccggtgcaggagggtaagtatccaatacccgaggacgcttggtacacggatgggtcctcacggggtaatccttcacggtggcgcgccgttgcctaccatcccagtactgagaccatttggtttgaagagggagatgggcaatcctcccagtgggcagaacttagagccgtatggatggtcatcacgcaagagcccggcaactctgctctcaatatatgtactgactcatgggccgtctaccggggacttactctgtggatcgcccagtgggctacccaggactggaccatccacgcacgccctatatggggaaaggacatgtgggtggatatatggaatgtcgtgagacatagaacggtgagggcgtatcacgtgtccgggcaccaacctctgcagtccccaggcaacgacgaggccgacacactggcccgcgttagatggctgggttctacacctaggcctaagaagaaaagaaaggtgggtggttctcctaagaaaaagagaaaggtctgagaattc

SEQ ID NO: 966 - DNA, 2163 bp, synthetic construct
  source 1..2163: mol_type = other DNA; note = MG151-120_cloned_into_untethered_plasmid
gctagcgccaccatgtacccctatgatgtacctgattatgcttctggcggcagcagcggcggctcaagcggaagtgaaacacctggaacttccgaaagcgctacgcctgaatcttctggtggatcttctggcggatcttccgcatgcggcatagctgccgtggacacggataacatcaaacagttgtccgtgcttccaggactctctgaggatccctccgccgtgggcctgctccaggtaaaagagcagcaggtccccatagctaccaaggcagtgcaccgccgacaatatagaaccaatagagacagtcttctccccatccataagctcatccgacagctggaaagccagggagttattagccggacacatagtcctttcaactctccaatttggcctgttaggaaagcctctggtgagtggcggcttatggtcgattaccgagggctcaacgaggtgacacctcctctgtctgctgctgtccccgacatgctggaactgcaatatgagctggagtccaaggcagcaaaatggtacgcaaccatagatattgcaaacgctttttttagcataccactcgccagagaatgcaggcctcagtttgctttcacatggagagggatacagtacacttggaacaggctgccccaggggtggaagcatagccctacaatctgccacgggcttattcaaaccgtgctggaacaaggcagcgcacccgagcacctccaatatattgacgatattgtcgtatggggtgacaccgccgaggatgtttttaagaaaggcgaacagattatccagatcctgttgcaggccggcttcgccatcaaacgaagcaaggttaaaggccctgcacaggagattcagttcctgggcatcaaatggcaggatgggaggagacatattcctgccgatgttattgacaagatcacggcaatgtcacctccaattaacaaaaaagaaactcagagcttcttgggagtagtcggattttggcggatgcatgtgccaaattatagtcttattgtgagcccactctatcaagttacgagaaaaaagaatgacttcacttggggaccagaacaacaacaggcatttgaacagatcaagcacgagatagcccgggcagtcgctttggggccggtgcgcactgggcaagacgtgaagaacatcctgtacacagccgctggagagaagggacccacatggagcctttggcagcgcacctccggtgagacacgcggtcggcccttgggtttctggtccagggcttacagaggttctgaagaatgttacactcccaccgaaaaggagatcctcgctgcatacgagggcgtcagggctgcttccgaggtcgtgggaactgaaacccaactgcttctggctccccggttgcccgtactgaattggatgtttaaaggaaaaatacctagtacacatcacgccaccgatgcaacctggagtaaatggatcgctttgatcactcagagggctagaatggggaacttttctcgcccgggcatcctggaggtgatcatggattggccagagggcaagaagtttgaaacctcaccgggcgaggaggtatcacgagcaaaagaggccccaccttacaatgaattgcccgggaatgaaaagaagtatgccttgttcacagacggctcatgtcgcattgttggaaagtaccggcgctggaaagctgctgtgtggtctcctgtcaggcaggtggctgaagccactgaaggaaaaggtgaatcctcccagttcgccgaggtaaaggctgtgcagcttgccttggatgtcgcagaacgggaagggtggccagtgctgtatctgtatacagacagttggatggtggccaatgccctgtggggatggcttcagcagtgggagcagaacaattggcagagacgaggcaaaccaatctggtcagccgaactttggaaagatatagctgccagaattaagaatatggtggtcaaggttcgacacgttgacgcccacatgccgaagtcaagggctactgaggagcagaagaacaatcatcacgtggaccaagccgccaagattgaggtggcacagatcgacttggatcctaggcctaagaagaaaagaaaggtgggtggttctcctaagaaaaagagaaaggtctgagaattc

SEQ ID NO: 967 - DNA, 2244 bp, synthetic construct
  source 1..2244: mol_type = other DNA; note = MG151-121_cloned_into_untethered_plasmid
gctagcgccaccatgtacccctatgatgtacctgattatgcttctggcggcagcagcggcggctcaagcggaagtgaaacacctggaacttccgaaagcgctacgcctgaatcttctggtggatcttctggcggatcttccgcatgctctctgtctctggcagatgaacaccggctgttcgagagtcagcaagagcccgggggcgacatgacccattgggttaagcggttccccactgcttgggctgagaccgccggcacaggtctcgccaaacatctgcctccagtggtgatccagcttaaggcaagcgccctcccaatcagggtgaaacagtacccgatgccagaggaagctagacggggaattgcacctcatattcacaggctgatcaaagaaggagtccttagaccttgccagtctgcctggaatacaccacttttgcctgtgcgaaagccggggtctggagattacagacccgtgcaggacctcagaaaggttaatgaaagaacagaggacattcacccaacggtcccaaatccctacaccctgctttcccatttgccacccagccaagtgtggtatactaccctcgatctcaaggatgctttctttagcattcccctctccgaaataagccagcccctgtttgcttttgaatggcaggaagacggtgggcaatcaggtcagctgacatggacaaggttgcctcagggattcaagaacagtcctacgttgttcaatgaagccctgtcacaggatctcgagcccttccgccgctcccatccacgggttacactgctgcagtatgtggacgacttgctgttggccgcagaaaccagagaagagtgcatcaaggctaccgagcacctcttgacggagctgggggagttgggatatagagcttctgccaaaaaaactcatatctgtaagcgaagcgtaacttacttggggtacaggatagccgatggggcaagatggcttactgacgctatgaagcagaccatcctggcaattccctccccaactagcacccgcggggtgagagaatttcttgggtcagctggcttctgtaggctttggatccctggatttgcagaaatagctaggcccctttacgaagctacaaaggaggcccctgattggagctggggcgagagagagcagcaggcattcgaccagcttaaagacgcacttcttcaggcacccgccctcgccctgccagaccctacacgcccatttactctgtttgtagacgagaaaaaaggagtagcaaaaggcgtcctgacgcagcagctcggcccctggaagcggcccgttgcttactttagtaaaaagctggatgccgtggccgctggctggcctccttgcctgaggatcatcgccgccattgctgtcctcgtacgagaggcagataaacttacattcggccaggcactgtgggttacagccccacaccccgttgagggtattctcaagcaaccaccgggcaaatggatgacaaacgctcgcctgactcattatcaagggctcctgttggatagcccccgaattacattcacagatccagtcatcttgaaccccgctaccctgctgccgaatcccgaactgcagacccctgtgcacaactgcaaggagtttctttcagaagttacccaggtgcgcgccgacttgaaagataccccgttgtccggatgtaaattgaactggtacacagatggttcttcattcttccaagacggagctcgaagagctggagcagcagtcgtggaccaggagggcaataccgtatggagtagtgccttgccaccaggcacttcagcccagaaagctgaacttatcgctctcgccgaggccctggagcgggccaagggaaagagggtgaatatatataccgattcccggtatgcttttggtactattcacgtgcacggtgcaatatatcgagaacgcggatttaggaccgcagaaggcaagcatctgaagaacttggctgaagttcaacggcttctgatggccgtggagaagcctaaggcagtcgctgtcatgtatgtccctggccaccaaagtgccaaaactcctgaggccgtgggcaataacagggccgaccaagaagctaaacgggtggccatggtgtctcctcctatggagacggggcagccatccactgtcgccgctattcctaggcctaagaagaaaagaaaggtgggtggttctcctaagaaaaagagaaaggtctgagaattc

SEQ ID NO: 968 - DNA, 2256 bp, synthetic construct
  source 1..2256: mol_type = other DNA; note = MG151-122_cloned_into_untethered_plasmid
gctagcgccaccatgtacccctatgatgtacctgattatgcttctggcggcagcagcggcggctcaagcggaagtgaaacacctggaacttccgaaagcgctacgcctgaatcttctggtggatcttctggcggatcttccgcatgcacagtatccctgcatgatgaacataggttgcatcaaatatctagcccacctatgctggatattgacaactggttgaaacaatacccccaggcatgggctgaaactggcgggatgggcctcgccaaacatagacctgcagtgtatatcgagttgaagccaggagctgatcccgtgcgagtacgacaatatcccgtttcactggaggctaggctggggataacaccccgcatttggaggctgctgaaagaggggatcctgcgcccatgtcagtcagcttggaacacccctctcctcccagtgcggaaacctcatacaaacgattatagacctgtgcaggaccttagagaagttaataaaccggtcatcgacatacaccccactgtgcccaatccctacacactgctgtccagcctggcccctactcgaacttggtatacggttctcgatctgaaagatgctttcttcagtctcccgcttgctcccaaaggacaggatctgttcgctttcgagtggacagacccagaagagcggatccacggtcagctgacatggaccagactgcctcagggattcaagaactctccaactatatttgacgaggcactgcacgaggacttgggggagtttcggacccagcatccagacctgacccttcttcagtatgttgatgatctccttatggctgttgagacgcaggctgcttgtctcaggggtacaaagtctcttctgcagatgttgggagacctgggctatcgggcttccgccaagaaggcacagatttgcaaaactgaggtgagctaccccggctacaagcttaaggatggccagaggtggttgacggaagctcgaaaggaaaccgtcctgaaaatatccaccccacagaatgcaagacaggttagagagtttcttggcactgcaggattttgcaggttgtggatccttggctttgcagaactggccaggcctctctacgaagccgccaaagaaagtaagaagttccagtggaccgaggcaactggaatggcatttaaaagactcaaggaagctctcctgagtgccccagacctggccctcctcgacctgactaagcccttccatctctacatcgacgaaaataagggcatcgctaagggggtgctcatgcaatcacttgggccttggaaaagaccaatcgcctaccttagcaagaaactcgacagcgtggcagccggttggccaccgtgtctccggattattgccgctgtagctatgcttgtgaaagacgccaataagctgacctggggccaagagctttacattattacgcctcacgcaattgaaggaatcttgcagcagccacccgacagatggctctctaacgctcgattgactcactaccagggcctcctgctgaatcctgcacgcattgtctttcaacggccaccgccacccgcaacattgaaccctgccactctccttccggctcccgatctggattctccgcttcacgattgcactgagatacttgcacaagtgcacggtgtcagagaagatctgcaggatcagcctcttccaaatgccgaggtgacctggtatacagatggatcctcatacatcaaagatggaatccggtatgccggcgctgccatcaccacagaaacggaaactgtctgggccgaacctctgcctgctggtacctcagctcaacgcgctgaactggttgcactcaccaaggccccaaccctcgggaaggataaacggcttaatgtcttcaccgacagtaggtacgcctttgctaccgctcatgtccacggaaatatctatagggagcgccgcctcctcaccgccgagggtaaaaccatccaaaacaaagacgagattctggccctgctgaaggccctgtggttgcccaagcagcttgcaattattcactgccctggccaccagaaacccacaacacccgtggccaaggggaacaacttggcccaccaggtgacacgcgaggtggcccttcaggtagactgtgcattgatgacaacattgcctgacccagggcccgccagccctaggcctaagaagaaaagaaaggtgggtggttctcctaagaaaaagagaaaggtctgagaattc

SEQ ID NO: 969 - DNA, 2163 bp, synthetic construct
  source 1..2163: mol_type = other DNA; note = MG151-123_cloned_into_untethered_plasmid
gctagcgccaccatgtacccctatgatgtacctgattatgcttctggcggcagcagcggcggctcaagcggaagtgaaacacctggaacttccgaaagcgctacgcctgaatcttctggtggatcttctggcggatcttccgcatgcggcattgctgctgtggatacggacaacattaaacagttgtccgcacttcccgggctgagtgaagatccatccgtggtgggtctgttgcaggtaaaggagcaacaggttcctatcgccacaaagacggtgcacaggcgccagtatcggacgaatagagacagtctgctcccaatacataagcttatacggcaactcgaagatcaaggcgtcatttccaagactcattctccattcaattctcctatctggccagtgagaaaggccagtggggaatggcgcctgacagtggactacagaggacttaatgaggtcactccacccctttccgctgcagtccctgatatgctcgagctgcagtacgagcttgagtctaaagcagctaagtggtacgcaaccatcgatattgccaacgcttttttctcaataccactggccaaagagtgcaggccccagttcgccttcacttggaggggcgtgcagtatacatggaaccggctcccgcagggctggaagcactctccaactatctgtcatggacttattcagacagtgctggagcagggatcagctcccgaacaccttcagtatatcgatgacatagtggtgtggggcgacaccgcagaagaggtgtttacaaaaggtgagcgcataattcaaatcctcctttgcgcaggtttcgcaattaaacgaagcaaagtgaaaggacccgcacaggaaattcagtttctcggtatcaaatggcaggatggccggaggcacatccccacagatgtgatagataagatctctgccatgagcccacctactaacaaaaaagaaacacaatcattcctcggcgtagttggtttctggcggatgcatgtgcccaactatagtctgatcgtctcccctctgtatcatgtcaccaggatgaaaaacgaatttacctggggacccgaacaacaacaggcctttgagcagatcaagcaagagattgccagggctgtcgcccttggccccgtccgaatggggcaaggaatcaaaaatatactttatacagctgctggcgaaaaagggcccacctggagcctgtggcagcgagccagcggcgaaactagagggaggccactcggcttctggtccagggcctaccggggatctgaagaaggatacacccctactgagaaggagatcctggcagcctatgaaggcgtgagagctgcttcagaagttatcgggactgagacccagctgttgctggcaccccgccttcctgttctgaattggatgttcaagggaaaaggaagtagctcccaccatgctacagacgctacttggagcaagtggattgccttgatcacgcagcgcgcccgcatggggaacttgaatagaccaggtattctggaggtcattatggactggcctgaaggcaagaagtttgggaccccgcctgctgaagagatcagccgcgccaaggaggctcctccgtacaatgaactgcctgagaacgagaaaacctatgcactttttacagacggaagctgttgcatagtagggaagcacagacggtggaaggcagccgtttggtcacccacaaggcaggtcgcagaagcaaccgaaggcaaaggagagtcatctcagtttgctgaggtcaaggctgtgcagttggccctggacgtagccgagagggagagatggccaatgttgtacgtgtacaccgatagttggatggtggctaacgctctttggggttggctccagcagtgggagcagaataactggcagagaaaagggaagcctatttgggctgccgacctgtggaaggacattgccgcacgaattaaaaatatggtgatcaaggttagacacgtagacgcccacgtaccgaaaaaccgagccaccgaagaacaacagaataatcatcaggttgatagggcagctcggatcgaggttgcccaaattgacctggatcctaggcctaagaagaaaagaaaggtgggtggttctcctaagaaaaagagaaaggtctgagaattc

SEQ ID NO: 970 - DNA, 2163 bp, synthetic construct
  source 1..2163: mol_type = other DNA; note = MG151-124_cloned_into_untethered_plasmid
gctagcgccaccatgtacccctatgatgtacctgattatgcttctggcggcagcagcggcggctcaagcggaagtgaaacacctggaacttccgaaagcgctacgcctgaatcttctggtggatcttctggcggatcttccgcatgcgggatcgccgcagttgacactgaaggcgtgcagcaattgtcaattctgcccggactttctgaagatccctccgctgtcggcctgctcagagtgaaggaacaacaggtccccattgctaccaaaactgtgcatcgcagacagtaccgaaccaacagagacagcctccttccgattcaaaagttgatccaccagcttgaaaatcaaggcgtcatcagtaagactcattccccctttaattctcccatttggccagtgagaaaagcatcaggggagtggcgactgactgtagattatcggggtcttaacgaggtgacgccacctttgagcgcagccgtgcctgatatgctcgagctccagtacgagctcgagagcaaagccgctaagtggtatgcaacaatagacatcgcaaatgcttttttcagtatccctctgaccaaggagtctcgaccacaattcgcattcacatggcgaggtattcaatatacctggaataggctgccgcagggttggaagcactcacccacaatttgtcatggtcttatacaggccgctctggagcagggcggagcccctgaacatctgcaatacatcgacgacattattgtgtgggggaatactgccaaggaggtgtttgagaaaggcgagcagatcatacagatcctgctcagggcagggttcgcaatcaagagaagtaaggtgaaaggaccagctcaggaaattcagtttctgggaattaagtggcaggacggccggcggcacatccccacagatgtgatcaataaaatttcagcaatgtcaccccctaccaataaaaaggaaacgcagagcttccttggcgttgtgggtttctggagaatgcacgtacctaactatagtctgatcgtgagcccactttaccaagtgacacggaaaaagaatgacttcatgtgggggccagagcagcagcaagcttttgaacagataaagcaggaaattgcccgggccgtcgccttggggcccgtgcggatggagcaggacgccaaaaacattctgtacacagccgccggagaaaaggggccaacttggagcctctggcaacgcgcttccggcgagacccggggaaggcctctcggtttttggtccagggcttatcgcggcagcgaggagtgttatacgcctacagagaaagaaattttggccgcttatgaaggcgtgagagcagcttctgaagtaatcgggactgaaacacagctgcttctggcaccaagacttcctgtcctcaactggatgtttaaagggaagggccccagtactcatcacgctaccgacgccacctggtccaagtggatagccctgatcacccagagagctaggatgggaaaccttaaccgcccagggatcctggaagtcatcatggattggccagagggaaaaaagtttggcacacccccggctgaagaaattagccgcgctaaagaggcacctccatacaacgagttgcctgaaaatgaaaaaacatacgctctcttcaccgatggatcctgctgcatcgtgggaaagcaccgacgatggaaagccgcagtttggtctcctactaggcaggtcgctgaggctacagaaggcaaaggtgagtcatcccagttcgccgaggttaaagcagtccaactggccttggatgtcgccgagcgcgaacggtggccgatgctgtacgtatatacggactcttggatggttgctaacgccctttggggatggctgcagcagtgggagcaaaacaactggcagcgcaagggaaagcccatttgggccgccgatctttggaaggatatagcagctaggatcaagaatatggtgataaaagttaggcacgtggatgcccatgtaccaaaaaatagggctaccgaagagcagcagaataaccaccaggttgaccgagctgccagaatcgaggttgcacagatagatttggaccctaggcctaagaagaaaagaaaggtgggtggttctcctaagaaaaagagaaaggtctgagaattc

SEQ ID NO: 971 - DNA, 2169 bp, synthetic construct
  source 1..2169: mol_type = other DNA; note = MG151-125_cloned_into_untethered_plasmid
gctagcgccaccatgtacccctatgatgtacctgattatgcttctggcggcagcagcggcggctcaagcggaagtgaaacacctggaacttccgaaagcgctacgcctgaatcttctggtggatcttctggcggatcttccgcatgcggtattgctgctgtggccgtagaggggatcaaacaacttaataccctgcctggcttgtcagaaaaccctagcgccgtaggcctgctgaaggtggaggaacagcaagtccccactgccacttccaccgttcaccgacggcagtaccggactaacagagacgctgtgattccgattcacaaaatgatacgggagctggaatcccagggggtggtaagcaagacccacagcccgtttaatagcccaatttggccagtgcgaaaaagtgatggtgagtggcggctgacggtggattatagggctttgaatgaagtcaccccaccattgtctgccgcagttcccgacatgctggagttgcagtacgagctggaatcaaaggctgctcgctggtatgccacaatcgatatagcaaacgcatttttcagtatccccttggccgccgaatgcaggccgcagtttgcatttacatggaggggagtacagtacacatggaacagacttcctcagggctggaagcattcccccaccatctgccacggtctgatccaagcagcacttgagaaaggggaggcccccgagcacctccaatacatcgacgatataatcgtgtggggaaatacagctgtcgaagtcttcgaaaaaggcgaaaaaataattcagattttgctgcgggctggatttgcaattaagaaaagcaaggtaaaaggacccgcacaggaaattcagtttctgggcgtgaagtggcaggatggtagaagacagattccaaccgaagtcatcaacaagattaccgcaatgtctccaccaacttcaaaaaaggagacacaggctttcctcggagctatcggattctggcggatgcatatacctgagtattcccagattgtttcacccctgtatctggtgacaaggaagaagaatgattttcattgggggcctgaacagcagcaagctttcgcccagatcaaacaggaaatcgcacacgccgtggcactgggtcccgtccggacagggcctgaggtgaagaacgtgctgtacagcgcagccggcaaccatggcctcagctggagtttgtggcagaaagtccctgacgagactaggggaaggcctctggggttctggtccaggtcataccgaggctctgagggaaattacacaccaaccgagaaggagatcctggccgcttatgagggagtgcaagcagcttccgaggtcatcggcatggaagctcaactgctccttgccccacggctgccagtgttggggtggatgttcagagggaaggtgccaagcacacaccatgcctcttcagctacatggagcaagtggattgccctcatcactcagcgcgctagaattggcaaacttaataggcctggaattttggaagtgatcaccaactggccggagggagaatcattcggtgtgacggacgaggagcaggaacccgtttctagggccgaggaagcccctccatacaatcagctccccgctgaggagactagatatgctctttttaccgacggctcttgtcgcattgttgggatgaaccgaaggtggaaggccgccgtttggagtcctacccgccgcgtcgccgaagccactgagggtgaaggcggaagttcccagttcgcagaacttaaggcaatccaactggctttggatatagctgaacgcgagaagtggcccaagttgtatttgtatacggactcctggatggtcgccaatgccctgtgggggtggctcgagcggtggaaagaggctaactggcagagaagaggcaaacctatctgggcagccgaggaatggaaggacatagcaactcgcctcgaaaaactccctgtgaaagttcggcacgtggatgcacatgtacccagatctcgagctaatgaagagcaacagaacaatcagaaagttgaccaagccgccaagatcggcgttagtaaaatagaccttgatcctaggcctaagaagaaaagaaaggtgggtggttctcctaagaaaaagagaaaggtctgagaattc

SEQ ID NO: 972 - DNA, 2172 bp, synthetic construct
  source 1..2172: mol_type = other DNA; note = MG151-126_cloned_into_untethered_plasmid
gctagcgccaccatgtacccctatgatgtacctgattatgcttctggcggcagcagcggcggctcaagcggaagtgaaacacctggaacttccgaaagcgctacgcctgaatcttctggtggatcttctggcggatcttccgcatgcggcatcgccgcagtcgaagcagaagggacgcgccagctgaatactctgcctggtctgagtgagaatccctctgccgtgggccttctgaaagtcgaagagcagagagttcctatcgccacatccacagtacatagaagacagtacagaacaaatagggacgctgttattcctatccataaaatgataagagagcttgagtctcagggggttgtctcaaagactcacagccctttcaattctcccatctggcctgttaggaaatccgacggtgaatggagattgactgtagattacaggggactcaacgaagtgacccctccgctgagtgcagccgtaccagatatgcttgagctgcaatatgaactcgagtctaaagcagccaagtggtatgccaccattgacatagctaacgccttcttttcaattccactcgccgctgagtgtaggccacagtttgccttcacctggaggggagtgcaatatacctggaaccggctgccccaggggtggaagcacagcccaactatttgccatggcctgattcaggctgctctggagaagggtgaggctcccgagcacctgcagtatatcgatgatataattgtctggggcaatacggctacagaagtgtttgaaaagggagaacgaatcattcagatactgcttcaggccggttttgccattaaaaaaagcaaggtgaaagggcccgctcgagagatccaatttctgggcgtgaaatggcaggacgggagaaggcagattccgactgaggtgatcaacaagattactgctatgtccccgcccacaaacaaaaaggaaacccaggccttccttggagctatcggattttggcggatgcacataccggagtactcacagattgtgagccctctctaccttgtcacacgcaaaaaaaacgatttccattggggtccagaacagcagcaagctttcgctcaaatcaagcaggaaatcgctcacgcagttgccctcggacctgtgcgcacgggaccagaggtgaagaatgtcctctacagcgcagcaggaaataacggcctgagttggagcctctggcagaaggtccccggggaaactcggggccggccacttggtttctggtctcggagctatcggggctccgaggcaaattatacccccaccgaaaaagagatcctcgctgcatacgagggtgtccaggctgcttctgaagtgattgggacggaagcacagcttcttttggcaccaagattgccagtgcttggctggatgtttaaaggcaaagtgccctccacccatcatgccactgatgcaacatggagtaagtggatagctctgataacacagcgagcccggatcggcaatcccaataggccaggaatcttggaaattattacaaactggccagaaggagagactttcggcttgagttccgaggaagaggaggaacaagtcacaagagccgaggaggcccctccatataatgagcttcctgaatccgagcgacagtatgctctgtttaccgatggatcatgccggattgtcggggcatctaggaaatggaaggctgctgtatggtctcctacaaggcaggtggcccaggcagccgaaggcgaagggggcagctcacaattcgccgaactgaaggccgtgcagcttgctttggacatcgccgaacgcgaacgctggcctcgcttgtacctttacaccgattcatggatggtggccaatgctctgtggggatggctcgagaggtggaataaggccaactggcaacggcgagggaaacccatctgggctgcagaggagtggaaggacatagcaaccagagttgagaagctgagtgttaaggtgcggcacgtggacgctcacatccccaagagccgcgccaacgaggagcatcacaacaaccagcaagttgaccaggcagccaaaattgaagtatcccaaatcgatctggaccctaggcctaagaagaaaagaaaggtgggtggttctcctaagaaaaagagaaaggtctgagaattc

SEQ ID NO: 973 - DNA, 2160 bp, synthetic construct
  source 1..2160: mol_type = other DNA; note = MG151-127_cloned_into_untethered_plasmid
gctagcgccaccatgtacccctatgatgtacctgattatgcttctggcggcagcagcggcggctcaagcggaagtgaaacacctggaacttccgaaagcgctacgcctgaatcttctggtggatcttctggcggatcttccgcatgcggcgtcgctaccgttaatgccgaaaaaattaaacaacttagtaccctgcccgggttgtccgaggacccttttatcgtggggctgcttcaagtggaagaacagcaggtgcctattgctacacgaacagtccaccggcgccagtatcggacgaacagagacagtcttgccccaattcatgagcttattcaccacctcgaaagccagggtgtgatctccaaaactcattctcccttcaacagcccaatctggcctgtgcaaaagagtgatggcggttggcgactgaccgtagactaccgaggactcaacgaggtaacacccccgctttctgctgccgtgcctgacgtgttggagctgcaatacgagctcgccagcaaagctgctacgtggtacgcaaccatcgatatagctaatgccttctttagcatccccctggccgccgagtgcaggcctcaattcgccttcacctggaggggcgtccagtacacatggaataggttgccgcagggctggaagcattctcccactatctgtcatgggctgattcagacagccctcgagcagggcgaggcaccagagcacctccaatatattgatgatataattgtctgggggaatgaagccgaggaggtgtttgaaaaagggaagagaatcatccagatcctgcttaaagccggtttcgctataaagaaatcaaaggtaaaaggacctgcccaggagatacagttccttggcatcaaatggcaggacggaaggcggcatgtcccaatggaggttgttaataagattgcatccatgtctcccccagcaaacaaaaaggagacccaggcttttctgggcctggtgggattttggaggatgcatatcccaggctacagccagcttgtgagtcccctgtaccgcgtgacacggaaaaagaattatttcgaatggggaccggagcagcaacaagcttttgaacatatccggcaggagattgcacgcgctgtggctctggggcctgttcgcaccggtccagacgttcagaatattctgtacaccgccgccggcgatcacgggcttacttggtcactgtggcagaaaactcctggagaaactcgggggagaccattgggcttttggtctcgagggtatcgaggatctgaagctcattacacccccactgaaaaagagatccttgctgcatatgaaggtgtgcgcgcagcctccgaggttgtgggtacagaggcatatctgttgctcgctcctagattgcccgtgcttcactggatgttcaaaggaaacattccttccacgcaccacgcaacttccgcaacttggagcaagtggattgctctcatcacccagcgcgcaagattggggaagtcaaataggccaggcatactggaagagattatggattggcctgaaggtcgcgattttggagccagtcccgaagaagtagctagagctcaggaggctcctccatataacgagcttccagaagatgaacgatgttacgccctgtttacagatggatcttgcagagtcgtgggcaaccaccggaagtggaaggcagcagtgtggtccccgacccggcaggtagttgaggctacagaaggagagggcgagtcatcacagttcgcagaggtcaaggctattcagctcgccttgaatatcgctgaaagagaaaagtggcccgtcctgtatctgtatactgacagctggatggttgccaacgccttgtggggctggctccagcagtggaagaagacaaactggcagagaagaggaaagcccatctgggcagccgccctctggcaagacattgccgcaagggtggaacacataacactccgggtgaggcatgttgacgctcacgtcccaaagagcagggccacggaagagcacaggaacaatgagcaggtcgataaagccgctaaaatagaaatcgcacaagtagacctggaccctaggcctaagaagaaaagaaaggtgggtggttctcctaagaaaaagagaaaggtctgagaattc

SEQ ID NO: 974 - DNA, 2160 bp, synthetic construct
  source 1..2160: mol_type = other DNA; note = MG151-128_cloned_into_untethered_plasmid
gctagcgccaccatgtacccctatgatgtacctgattatgcttctggcggcagcagcggcggctcaagcggaagtgaaacacctggaacttccgaaagcgctacgcctgaatcttctggtggatcttctggcggatcttccgcatgcggcgtggcctctgttaatactgagaaggtgaagcagctgtcaaacttgccaggcctctctggggaccccttcgttgtcggcttgctcagggtcaaggaacaacaagtgcctattgccatgcggacagtacatcggaggcaataccgaactaatagggaccctctggccccaattcaagaactgatcaggcagctcgaaacgcagggtgtcatctctaaaacacatagcccatttaactccccaatctggcctgtgagaaaatctgatggcggctggcggctgacagtggattacagaggcttgaatgaagtaaccccacccttgtcagctgcagtaccagacatgctggagctgcagtacgaacttgagagcaaggctgccaagtggtatgctactattgatatagccaatgcttttttcagcattcctctcgcagaggagtgcaggccccaattcgctttcacctggcgcggagtgcagtatacctggaatagattgccgcagggatggaagcacagtccaacaatatgccatggattgattcagacagccttggagaaaggggatgctcctgagcatcttcaatacatagacgatattatcgtatggggcaacaaagcagaggaggtctttaaaaaggggcagaaggtcatcgagatactcttgcgcgctggattcgctataaagaagtccaaggtcaaagggcccgcccaagagatccagtttctgggcattaagtggcaggacggcagaaggcatgtccccatggaagttgtcaataaaattgccgcaatgtcacctcctactaacaagaaaggtacccaggccttcctcggtttggtgcgattctggcgaatgcacatacccggatactcacagctggtgagtccattgtaccaggtcacgagaaaaaagaacaacttcgaatggggcttggagcagcagcaagcctttgaacacattaagcaggaaatcgcccgcgcagtcgctctcggccccgtgagaaccggacccgatgtacagaatgtgctttatacttcaacaggagagcatggtcttacatggtccctgtggcagaaagtggccggcgaaaccaggggccggcctcttgggttttggagcagggggtataggggttccgaagcccactatactcccaccgagaaagagattctggcagcatatgaggggatccgcgctgcatccgaggtggtgggaaccgaggcccagctgctgctggctccacgactgcccgtgttgcactggatgtttaaaggaaatatccctagtacccaccatgctaccagtgcaacatggtctaaatgggtggccttgattacgcagagagctcgccttgggaagccaaatagaccgggaatcttggaagagatcatggactggccggagggtcgagactttggggcactgcccgaggaagttgcccgggctcaggaagcacccccgtataatgaactccctgaagacgaaagacggtacgcactgttcactgacggtagctgtcgggttgtcggaaaccaccgcaaatggaaggctgcagtgtggagtcctactaggcaagtggtggaggcaacagaaggcgagggggaaagcagccagtttgcagaagtgaaagctattcagcttgccctgaagatcgctgaacgagaaaagtggccagttctctacttgtatacagattcttggatggttgccaacgccctctggggatggctgcaagagtggaagaaaaccaactggcagcggagagggaagcctatctgggctgctgccctttggcaggacattgcagccagagttgaaaacgtggcccttaaagtgcgccacgtagatgcccatgttgccaaatcccgggccactgaggagcaccagaacaatgagcaggttgataaggctgctaaaatcgaggtggctcaactggacctggatcctaggcctaagaagaaaagaaaggtgggtggttctcctaagaaaaagagaaaggtctgagaattc

SEQ ID NO: 975 - DNA, 1923 bp, synthetic construct
  source 1..1923: mol_type = other DNA; note = MG151-129_cloned_into_untethered_plasmid
gctagcgccaccatgtacccctatgatgtacctgattatgcttctggcggcagcagcggcggctcaagcggaagtgaaacacctggaacttccgaaagcgctacgcctgaatcttctggtggatcttctggcggatcttccgcatgcatgcccatagtgtggctgaccgaggagccagtgtgggtgcctcagtggcctctgccaagcgttaaactggccgccgcaaaagacctggtaaaaacccagctggagttgggccacatccagcattcaacgagcccatggaacacccccattttcgtgataaagaaaaagtccggccagtggagactgctccatgatctccgagcggtcaatgctcagatgcagcttatggggcccgtccagcgagggctgcctctcctctctgcaataccgaaggactggcacgtgattaccatcgacataaaggactgctttttctctatccccctgcaccccaaggattcacaacggttcgcatttactctgcctagtctgaatcacgaggaacctgatcaacggtatgaatgggtcgtgctgccccagggaatggctaattcccccaccatgtgccagatttttgtcgccaaggtcctttcacccatccgccagaggtaccctagcattaaggttgtccactacatggacgatatattgctggcagcgaaaagtgagagtctcgtgtccgaagcttatcgcgacctgacccaaagcctcgcgaaagctggcctttatattgccccagaaaaggttcaaacaggaactcttatcacgtacttgggaaccaccatgaactacaacaaactgtctccccagaagatcactatcaggacccaggaccttaaaaccctcaacgatttccagaagttgctgggagatattaactggatacggggttacctgcatatccctaacattacattgcagccgttgtacgccatcctgaaggggagccccgatctggcaagtccacggattttgacggaagaggcaagagaagccctcggtaaggtcgaaaaagccctgcaacatgcttccctgaataggttccaggatactaagccttttcaactctgtatccttgcaacagccagacagccaaccggagttttgtggcaggaaggtcccctcttgtggatccacccctatgtctctccaaacaagagtctcgagcattatcccgaggccgttgctttgttggcattgaaaggcatccaacagggggtacagttcttcggacaaccaccattctcactcattattccgtactcaaaggagcaggttaatgtgctttgtgccacactggacatatgggctgtgctgtgttgcagctttcagggcaatatcgataatcattacccagctcacccactcatccactttatcaaacgccatcctattatcttcccaaaggtgacttcctcaacgccgataccgggcgccgtgaacatctttacagacggcagcaagactgggatcggcgcgtatgtgatcaacgacagccctcccgtacagcatcagtttacacctggcaacccacagcaggtggagttgcagattgtgatcgaggtgtttaaagcctgctccttccccttcaaccttatctctgatagcgtttacgtagtccaggccctgcaaattttggaaactgtgggtgccatctccacatctcacaatgtgtccatttacttctcccaactgcaacagctgattacatctaggaccgagcccttttatcctgtacacattcgctctcacacaagcctgcctgggccgctgtctcaggggaatgcttgcgccgacgcagccactagaagtcagcttgtgtgtttggctcctaggcctaagaagaaaagaaaggtgggtggttctcctaagaaaaagagaaaggtctgagaattc

SEQ ID NO: 976 - DNA, 1953 bp, synthetic construct
  source 1..1953: mol_type = other DNA; note = MG151-130_cloned_into_untethered_plasmid
gctagcgccaccatgtacccctatgatgtacctgattatgcttctggcggcagcagcggcggctcaagcggaagtgaaacacctggaacttccgaaagcgctacgcctgaatcttctggtggatcttctggcggatcttccgcatgcgctaacagcaaaccgcttgaagtgcctactgcccttcccttgaagtggctcaccgagaagccaatttggatcaagcagtggccattggccgaagataaactccaagctctggaacagctcgtgcaagaacagagagacgccaaccatatagaagaaagcacctctccgtggaatagtcctgtgtttgtagtcaagaagaagtctggcaaatggcgcatggtgaccgatctgcgggcggtcaacaaagtgattcaacctatggggcctctgcagagcgggctccctctgcccagtctgctgcctaagcggtggcccctgatcataatggatctgaaggagtgtttctttacaattcccctccaggagaaggatagggaaaaatttgccttcaccgttcccacttacaacaacagccaaccctctcgaagctaccagtggacagttttgccacaaggaatgctcaattccccgatactctgccagtatttcgtgaataagtcacttgagataatacgcaagcagttcccaaagtcaatcatttaccactatatggacgatattctgctctctgactcaaataaggacacccttgagagcatgtttgaggaagtgaagaaggtgctgccccggtggggtttgcagatcgcccccgagaagattcagagggaagactccataaactacctgggctacagaattggactggaaaaaatccgaacccaaaaagctcagatcaggagggacagactgcgcacattgaatgatttccagagactgttgggagatattagttcccttcggccggcggtgggtatcacccctgatctcatcgtgcatcttaataaaaccctcgatggcgacaaggatctgaacagcccacggaagcttacagtagaggccgaaaaggaactcaccatgattgaagaaaaattgcaagaagcccacgtagatcgggtgaacccaaacctgagttctatccttgtgatcctcccatcacgaatcagccccactgggatcttgatgcagagggaggacatcatactggagtggatcttcatcccacacaaaccatcaaagaaactgaaaacctatgtcgagaaagtctccgagctgattatcaaagggaagctgaggctgcgccaattggcgggaattgaccctgcagagattatcgtcccatttacgactgaggagatcaggaaactgtgggaggacaatgaaccttggcagcgggcctgcgcaaactttctcggcgagattagtagtaattaccccaaatccgatcgccttaaccttatcaaacgaacgagctggatccttcccagaattgtccgcgatgcacccatcaccggggctcgcacattttatacagacgcaaataagtctggaaaggccggttacaaatccgaggagttgtctaaagtggagcagtccccatacaattctgttcagaaggcagaactgtatgctattttgatggtcctgagagacttcaaggagcctctgaatattgttactgactcccagtatgctgagagagttatcctgcacatcgagactgccgagttcattcctgacgacactgagctcacgtccctgttcatagaagtgcaggatattattagaaacaggctgtgtcctatgtatattacacacatccggagccatacaggtttgcccggcccgctggcacagggcaacgctgagatagaccagttgctgatcggctcagtactccgacctaggcctaagaagaaaagaaaggtgggtggttctcctaagaaaaagagaaaggtctgagaattc

SEQ ID NO: 977 - DNA, 1923 bp, synthetic construct
  source 1..1923: mol_type = other DNA; note = MG151-131_cloned_into_untethered_plasmid
gctagcgccaccatgtacccctatgatgtacctgattatgcttctggcggcagcagcggcggctcaagcggaagtgaaacacctggaacttccgaaagcgctacgcctgaatcttctggtggatcttctggcggatcttccgcatgcatgcctatcccgtggcttactgaggaggcagtttgggttcctcagtggcccctctcctccgagaagcttgaggccgcccaccatctcgtgcaggaacagctgcaactcggacaccttgaaccaagtgtctcaccatggaacacacctattttcattatcagaaagcgaagtgggtcatggcgcctgctccatgacctgagggccgtcaatgctcagatgcgattgtttgggccagtgcaaaggggtcttcccctgttgagcgctcttcccaaggaatggaaagtaatcatcatcgacatcaaggactgctttttcagcatcaggctgaataccaaggataaggagaggtttgccttcacattgccggcgatcaaccatgagcagccagacgcaagattccagtggaaggttctgccccaagggatggcaaacagccctacaatttgtcagctctacgttcaacaggcactggctcccatcagagaaaactaccctaaacttaagattatccactacatggacgacatacttttgtgtagtccacagtcagccgaagtggaggaggcttacgtgaagctgacaaaatctctggagacctggggcttgaacattgccagcgaaaaggtgcagaagtcaagcgtgagtaagtttctcggcgctactatttacaccgacgtgatttgcccccagaaactgaaaattcggcacgatcagttgaggaccctgaatgatttccagaaactcctcggtgatattaattggctgcgcccttttttgcgggttcctacgaccgatcttaagcccctctttaagattcttgaaggtgactcccagttgacatcccctcgctcattgactccggaggcggttcaggctatccataaggtggaacaagcactgatgaccgcacaacttaatcggattcagctcaatgagccatttgagctgtgcatactcccaacccctggcctgcccactgccgtgctgtggcagagaggaccgctgctttggatccatccccaggcgtcccaggcccgaactatcgagtattaccccgctgcaatagctaacctggcattgagaggcgtcaaaaatagcttcacatattttggaaaagccccagcgactatcataaccccttataatatggaacagatccaaatactctgcgcaatgaacgatgactgggccatcctggcctatagcttctctggcaccttcgataaccactttcccaagcacccacttatcaatttcgccagaaaccatcctttggtgttccctcgggtaacatctctgacacccctgccacacgggaagaccgtgtataccgacggcagcaaaacaggaacgggcgcatatgtgcacgatggggaagtggtcactaaaaactacactcctaatacgccccagattgtggagtgtcacatcgtccttgaggtactgcagacgttccatgagccactcaacattgtgtctgattcctcctatgtcgtgaatgccgtcaactccctggaagtagctggactgataaaagcctcttctagtgtcgccacactcttcaaacagattcaatcacagctgcttttgcgccggagcccgttgtacatgacccacatccgcgctcattctggcctgccagggcccatgactcaaggaaaccacctggccgatatagccaccaggagtattgcttttcccctgcttgaccctaggcctaagaagaaaagaaaggtgggtggttctcctaagaaaaagagaaaggtctgagaattc

SEQ ID NO: 978 - DNA, 1950 bp, synthetic construct
  source 1..1950: mol_type = other DNA; note = MG151-132_cloned_into_untethered_plasmid
gctagcgccaccatgtacccctatgatgtacctgattatgcttctggcggcagcagcggcggctcaagcggaagtgaaacacctggaacttccgaaagcgctacgcctgaatcttctggtggatcttctggcggatcttccgcatgcatgcgcgctatcgatctcccagtgccccacgcagacaaaattaaatggaagagcgatagtcctgtatgggtggatcagtggcctctgaaccaggagaagctcaccgctgctaccaaacttgtgcaggaacagctggctgccggccatctggaaagcaccacctccccttggaatactccaatttttgtcatcaagaaaaagtctgggacctggagactgctgcaggacttgagagaaattaacaaaaccatgtttagcatgggggcgctgcagccctcattgccgagcccaattgccataccagcaaattactttaagataataatagatctcaaggactgcttcttcacaatccccctccaccctcaggatcgggagcggtttgccttctctattcctgtcactaacttcaaggggcccatgcataggtatcagtggaaggtcctcccccagggcatggccaactccccaacactttgtcagaaatttgtggcacaggccgtggaccccctgagaactagatggccgtctatttatatcatacactacatggatgacatactgttggctggagcaagccgcacccaggtcttgacctgcagccaggagttgacaactcacttgactttctttggtctccaaatcgcgcccgataagatccagcttacggacccatactattatctgggttttgagctgacctggaataagatcacaacgcagaagatccgcctccggacctctcacctgcatacactgaacgacttccaaaagtttctcggcgatataaactggctccgcccctacctgaagctcacaaccggcgaactgaaaccacttttcgacatcttgcagggtgaccccaacccaagcagcccgcgagatcttagcacagaagcgaaagagacacttaacatcgttgagacagccatccagcaacagcagatcaccttcctgtcatacgataggcctttcgcgcttattatttgtaatactccccatacaccaacaggcgttctgtggcagaataaccccctgctgtggattcacctcccgagttcaccatctaaagtattgatcacttacccattgctggttgcaaagattatcaagatgggcagagagaagtcacggcagtactttgggcgagaccctgaccaacttattatcccctacaccaaggaacagatcgactggcttttgcaaaacgaggacgattggattattgctctgacgtccttccagggaaagattgataatcactatccttcccacaaactcttgcagttcagtaggctgcacccgtttatcttccctaaaatcacctcatcaacgccactggataacgcaccactggtgttctccgatggctcctcctccggaatcgctgcctatgtgatcaattctcaatctcatagcatccaaagtccttttaaaagtgcccagttggtggaactgttcgctattctccaaatattcaaagtgttgtctcaagtccccttcaatctctatacagacagcgcctatatcgcatactccgttccgattttggagaccgtgcctcacattaaaccctccactaatgccgtatcattgttccaacagctgcaaacttttatcctgaggaggcaggcccccttttacattggacatctgcgggctcatacggacctgcctgggcctctcagtcagggaaatgccttggccgaccagaacactcgatttacttacagtgtgcctaggcctaagaagaaaagaaaggtgggtggttctcctaagaaaaagagaaaggtctgagaattc

SEQ ID NO: 979 - DNA, 1983 bp, synthetic construct
  source 1..1983: mol_type = other DNA; note = MG151-133_cloned_into_untethered_plasmid
gctagcgccaccatgtacccctatgatgtacctgattatgcttctggcggcagcagcggcggctcaagcggaagtgaaacacctggaacttccgaaagcgctacgcctgaatcttctggtggatcttctggcggatcttccgcatgcgtgtcagcccccgatccccctgtaccccatgcagacaagatcatctgggaaacccagattccagtttgggtcgatcagtggcccctcacccaggagaagctcaaagctgcttctatgctggtgcaggaacagttggccgctgatcatgtggagccctcaaccagcccttggaacacgcccatatttgtcatcaaaaaaaagtctggtaaatggcggctgctgcaggacctgagggcaattaacagagtaatgcggccaatgggcgccctccagcccggaatacccacaccagtcgcgattcctaaggattattacaagatggtaatcgacctgaaggactgcttcttcacgatccccctgcaccctgaggaccgcccttacttcgctttctctctgccccggatcaacttccaagggccaatgcagaggtttcagtggaaagtgctcccacaggggatggccaactccccaagcctgtgccagaaatacgtggcccaggctgtagatcctgtgagaaaacgatggccacagatttatatcctgcactacatggacgaccttcttattgccgcacccgatacgcacaacctgaacggatgttatttggatctgtataaagctcttaccactctggggcttcaaattgcaccagataaggttcagacacaggatccttacacttatttgggcctgcagcttcaagggaatcaaatccaaacccctaagatccagttgcgcgttgaccacctgcacaccctcaatgactttcaaaagctcatgggtgatatacagtggctgagaccctacttgaagctgccgacctgtgttctgctgccactcaatgacatcctgaagggcgactctcacccgacttccccacggaagttgacaccagaagcacaacaggccctgaatcaggtcactaaggcaataactcaacagttcgtgactcagataagttataatcttccgctgatcctcgttattttgcacaccccgcatactcctacgggaattttctggcagcgcgatccccattttaagaacaagggttgccctttgttttgggtgcacttgcctactacatccagcaaagttatcacagtctaccccgcacaggtggcctccgtgattgtgaaaggccgattgttgtcaaggcagcactttggaaaagaccccgacaagatactcatgccctacacaaaagatcaaactcagttcctccttcagaccgaagatgagtggtccatcgccctgtccggatttttgggcacaatcgataaccacttgccaagtgaccccctgctgcattttgcgcagcttcacccttttatttttccgaaaatcacgcagaaggccccaatcccgcaggctctgacagtgtttaccgacgggagttccaatggatgcgccgtgttcgtcgtcggcaatcagcctacaacattcgaaaccgcataccaaagtgcacaactggtggagctgttcgccatcgcccaagtgttcatcacctttttggacaaaccagtcaacatttacaccgacagcgcgtatattgctcattcagtgcctcttctcgagatctctcccgccattaaggcctctagcaatgcagcgttccttttccatcagctccaacagctcatacagaccaggcgccaccctttctttcttggccatattagagcgcatagcgacctccctggcccacttactcaggggaacgctcaggctgatgccgctacatgttcaattttcccaatctttgccagccctaggcctaagaagaaaagaaaggtgggtggttctcctaagaaaaagagaaaggtctgagaattc

SEQ ID NO: 980 - DNA, 1944 bp, synthetic construct
  source 1..1944: mol_type = other DNA; note = MG151-134_cloned_into_untethered_plasmid
gctagcgccaccatgtacccctatgatgtacctgattatgcttctggcggcagcagcggcggctcaagcggaagtgaaacacctggaacttccgaaagcgctacgcctgaatcttctggtggatcttctggcggatcttccgcatgcatgagacctcgacctttgagtatcacttggttgtccgatgacccggtgtggatagaacagtggcccctgactaaagacaagcttcaggcagcaactcttctggtgcaggaacagctccgggtggggcatattgtacctagtaccagtccctggaataccccaatcttcgtcatccgcaagggctcaggtaagtggcggctgctccaggatctgagggcgatcaacaataccatgcagccaatgggaccgctgcaacccggcctgcctttcccaaccgctataccgaaagactggcatctgattattcttgatctgaaggactgtttcttctccataccactcgctccccaagactgcaagagatttgccttctccctgccctccatcaactttagagaaccttatcagcgctttgagtggacagttctgccccagggcatggctaatagcccaacaatgtgtcagtacttcattgccaagattctccagccgttcagacagcagtttccaaatttttacctggtgcactacatggatgatatactcctcgccggacccgataggaaggctctgtttcggagttacgaggtactgcagtctttgctcaaaggggcaggcctgatcatcgccccggaaaaagtccagatccaatacccctacaattatctcggctatactataaacaaagttggcattacccctcaaaggccccaattccaggtcaaccaactgaaaaccctccatcagtggcagaccttccttggggagatccaatggctccggccatcattgcacgtgcctacaggtgaattgaagccactttatgacttgctgagaggcgatccatctccgacaagccccaggaaacccacaccagaggccctcaaagccctgagactgatcgagactgcgttgcaggagatgcaggtcatgcaggtggactactcccagtctctgctgttcattgttcttccttctaagcttactcctacgggggttttctggcagacaggacctatctactgggttcacctgcccgcctctccttcccgcgtgttgatcccttttcacgacctcgtaattcaacttgtgtggaaggcgaagtacctgggagacgccctgttcggaaaaacattcgatgtgttgatcctgccctacaaccaggacattctgagtaagctccgccaggagcatgatttgtggtgcctgtttttttgctctttcatgggccaggtggacaatcactatcccaaaagcaggctgttggagtctttgaagacatgcccaatcatctttcctaaaattcttaagaaagacccactcccaggggcccagacggtatttacggatggtgctaagaacggattcgctgtggtcagcgacgggacgcaagtgattcgaaaacgcgtcgccgactgtagcgcacagaaggctgaggtggccgcgctgatcctcgccctgcagacttatagcagcgttccactcaacgtgttcaccgatagcctctacatcgcacggcttgcctcagcaattgaaaccgccccttatattggcaagcagtcaaccattatggatcagctccaaacagtccaattgctgatatgggctagggcagaccccttgtttatcgggcacatccgatcacactccggacttcccggtcctctggccgccggcaacgctatggctgatgcagctacacatgcaaccaattttatatataccattactcctaggcctaagaagaaaagaaaggtgggtggttctcctaagaaaaagagaaaggtctgagaattc

SEQ ID NO: 981 - DNA, 1956 bp, synthetic construct
  source 1..1956: mol_type = other DNA; note = MG151-135_cloned_into_untethered_plasmid
gctagcgccaccatgtacccctatgatgtacctgattatgcttctggcggcagcagcggcggctcaagcggaagtgaaacacctggaacttccgaaagcgctacgcctgaatcttctggtggatcttctggcggatcttccgcatgctttagggaaatgtccatcgcccccagcttcgcgctccctctcaaatggctgacgaagcagcccatatgggtcgagcaatggcctctcacgaaggagaagctgtctgctctcgagaaaatcatccaacagcttctcaaggaagacagaatcgagacttcagtgagcccatggaatagtccaattttcgtgattaagaaaaagtctgggaaatggaggcttattacagatctgagaaagataaacactgtgattcagcccatgggtgcactccagccagggctgcctcagccgagcatgatcccgaaaaactggttcctgacaattatagatctcaaagattgtttcttcactatcccactgcaaccccaggaccgagagaagtttgcttttaccattccgtctctgaataacaataaacctacatcacggtatcaatggaaagtgctgcctcaaggaatgcttaactcccctacactgtgccagttttacgtcaaccagcctctggagagactccggtccttgtttccttccgccctggtaatccactacatggatgacgtgctgtttgcacattacgataagataaagctgaaacagctggtaacaaaagcagagagcgttctgggtgagtatggcctcattattgccaaggaaaagattcaggaacagccgccatttgaatatctggggaataagctggaccagacaaggatctggccccaaaaagtcgagcttcgcagagattgtctgcacactctgaatgatttccagaaactgttgggtgacatcaattggcttaggcccagcctcgggattcccacctacgccctcaaaaaccttttcctgaccttgcagggagaccccgcgttggattcccctcgctcactttccaccttggccgaaaaagagctccttcaaatcgaacagatcatgcagaccgcttatctggacagaatcgaccctaatgagccagtggtactggttgtgtttcccagtcaacattcaccaaccggtatcttttggcaaaaagatctgatcctcgagtggttgttcttgcccaataaagaacaggagcgattgagcacttacctggacaagatatgcaagattatcgctaagggccggctgaggctgcggcatttgattggaacagatccacagcaaatcattgtcccactgacccagcaggagatcttgtgccagtataagcttagtaacgaatggcagctggcacttcaggattttcttggcgacatccataacaacttccctaaaaataagcgcttgcagttcctgaagaagacacaatggattttgcccagtatagtgaaaactaagccaatccctaaggcagacactttctttacagatgcgaacaaacttggaatggctggctacaccggacccaagacccgagtggagcagacaccattccgcagcgtccagaaggctgaactcgccgcaataatcatgctcttgcaggactactctgacccgttgaatttggtgacggactcacagtatgctgaacacaccgtgaaggagatagaaacggccacccttattgccgatgggtctgagatcgttcagctcttctccattcttcagctgctgatccgcaacagatctcagcccatctttataacccacattcgggctcacactgccctccccggcccaatgagtgccggcaatgaacaaatcgacaggctgttgattggcaacgttcaggcagccatggaccctaggcctaagaagaaaagaaaggtgggtggttctcctaagaaaaagagaaaggtctgagaattc

SEQ ID NO: 982 - DNA, 792 bp, synthetic construct
  source 1..792: mol_type = other DNA; note = MG160-17_cloned_into_spCas9(H840A)_tethered_plasmid
aagattcagaacaataatttgtgggacaataggtttaagatagccaaaaacggaggcgagacttggatctacgtgccgagcgattcaagtcggaaactgggccttacgatcaagaaacatatttcaagcaactgggacatccccgactatttctaccactttaaatcaggcggccatatcgaagcggcaaaattacatctgaatcactgtcatttcgcttctatcgacctcaaacaatttttcagcagcctctctctgagtagagtcactagggctcttaagaagttctggccttacgaagaagccaggatcttagccaagtatagcgtggtcaaatgcctcgacaatagaaccggccaatgcaccatgatccctttcggcttcgtgcaaagtccaataattgcatccctgtgcctcgagcagtctcatctgggcacagtcctgaataagatttacgaaatgcagggaattaaagtctccgtatacgtggacgatattataatctctggaaacaacctggaacttttggaagaacagtataggtgcttgctgggagcagtggagaagtcaggcctccaaacctcagaatataaaaaccaggaacctagctccgagattacagtgtttaacatgaagcttaagcaccagtcccttgaacttaaggacgaactgatcaataaattccacagtaagttccaggccacggacaatagcaatatccgcgatgggatactgaggtacctggtgagcgtgaatccagaacagtccaagctgtttatcgaaaattccaaa

SEQ ID NO: 983 - DNA, 768 bp, synthetic construct
  source 1..768: mol_type = other DNA; note = MG160-28_cloned_into_spCas9(H840A)_tethered_plasmid
actattgaagtgcagcgatgggaggataagttcgaaatcaaaccgggtgtctgggtttacgtgccttctgttgaggcccgtaaggtgggcggcaaaatcctccaggctgtgaggaataaatggattccgccactctatttttaccacctccgtaccggaggccatctgaaggcagcccgcttacacttaaaatccgatttctttgccgtggtggatataaaacagttctttcaaagtacgtcaaggagccgtatcacccgagacctgaagtcttacttcacatacagccaggctagagagatctctactttctcaactgtgcggaatctttcccattctcctcataaacacgtgcttccatttggatttgtacagtctcctatcctcgccactctgtgtctggacaaatcctactttggctccctccttagacggttgaacaaacaccatgatctgaagctgtcagtgtttatggatgacgtcattatctctagtaatgatctggcacagctgcaggccgcttatgatgaggctctggtcgcaatgcgtaaatcaggttaccaggcgaacatgagtaagacacaggctccaagtagtaaaatctccgtgtttaacttgactctgagcaaaggtgtgatgaaagttacatctcaaaagatgagtgatttcttgattgacttctatagtagtaattatgaacctcataggatcggagttaaaaattacgttgaggccgtcaatcctggtcaggccaaacttttcaagctc

SEQ ID NO: 984 - DNA, 762 bp, synthetic construct
  source 1..762: mol_type = other DNA; note = MG160-31_cloned_into_spCas9(H840A)_tethered_plasmid
caaaattcacataagtggctctcaagattccggctcaagagcaacacatgggtttttatacctacgttagagaccgtaaaggaaggcaagctcttaaaaaaggtcatcgagtttaagtggcccccacctcccaattactatcacctgagatccggcggacacgtggacgcggtgaaatatcacatgggggggagattctttgtacatgcagacattaaaaagttttttaatagcataaatcggagtagaattaccagagagcaaaagccctactttggttacgagaagagtagggctatcgctatggagtccactgtgagcatccctttggattccgggcaggtatttgcacttcctttcgggttcgttcaaagtacaataattgcaagcctctgtctgagaaagagctctctcggaaacactatcgagatgctgaacaagaccgatggagttagggtgtctgtctacgtggatgacattatcgtcagcacacagtgtctgaaaaaggccgagactgcactgcttatgatccaaaagagtgccgagagatcagggttcagtctcaataaggaaaaaagccagggaccatctgacaaaattacagttttcaatattgacctgaagcagaacctgattgaaataacatcctggaggttcaatgaactgcttagtagttacaagaatgcgtccagcgataagcaaaagtctggaatatgggggtacgttaatagcgtaaacagtgcccaggcctccatgttagtg

SEQ ID NO: 985 - DNA, 753 bp, synthetic construct
  source 1..753: mol_type = other DNA; note = MG160-37_cloned_into_spCas9(H840A)_tethered_plasmid
ccgcagaagtgggacacccgtttccaactgaagcctggaacctgggtgttcgttcctaccgacgaagcaagagagctgggttacgtcatcaaagagctggtagagacaaggtggcgaccccccaaaaactatttccacctgactaatgggggacatgtgagggccatctcctcccacgtgcataataccaccttcgcccatctggatatacaggacttcttcggtcacattaacgcaagtagagtaacacgatggcttactcccctcgctggttatgctaaagctcgggagtttgccaaagcatctacagtcccctacccaaatcacggagggaccatgctcccttttggattcgttcaatccccaatacttgcctccctctgtcttttccactcagcactcggtagatgtctcgctgaacttccccggaagttaggagccgtagtttcagtctacatggacgacatcattttaagcgccagcgatcactccgtgctggaacaggctgtgaaaatggtcgaggagagcgccgagagaagtggactcccattaaatcccgataagcatgaaggccccgcagctggtataacagcttttaatatagcattagcacaccagtctctgcgaatcaacgacgaacgttggaactcctttttaaccgagtttcaggcctctgacaacgattcagtccgcaggggcatccattcctacgtgcatagtgtgaacgtggagcaggcgaataacctgggactt

SEQ ID NO: 986 - DNA, 822 bp, synthetic construct
  source 1..822: mol_type = other DNA; note = MG160-40_cloned_into_spCas9(H840A)_tethered_plasmid
agcctcacatgggttcacaggttcgaaagaaaacctgggaggtgggttttcgagccttctgaggaagccagaaagcaaggcgctgagatcaaagctctgattgagactcattggaaacctccctccttttactttcatctccgccagggcggccatgtggctgctcttagagcacacctcgcttctacttggtttgtgaagctggacatagctgatttctttggatccgttagtagaagcagaattgctaggcttctcaaggagttcgtgccttacagggacgccttgcacatggcaaccagtagtaccgtgcgacatccaacagaagtcagtcgcctgatgttgccatacggattcgtacaatctccagttatcgcgtctctggcattagctaagtctgcgcttggaaagtacctgagaactcttcactctgaccaggatttggtagttaccgtctatatggacgacgtaatcgtttctggtgtggatgagcacaggttagccgatgtcgcccaaaaattggacagtttggccaaacgaagccgcttcgagttgaatgccgataaaactcacgggcctcttgccaaactgagggcttttaatatcgatctggccgacgctgcaatggtaatagccccaaatcggctggaccaattgaaaaatgtgcttgaggaatccaccaatggtttccaaatcgagggaattagatcctatgtcaaaagtgtgaatgaggaacaggcggccgagctcggtgatccgttggctggcactgacacagaaccacatggcgcaagcaaggatgatctcggcaagccacccgcc

SEQ ID NO: 987 - DNA, 729 bp, synthetic construct
  source 1..729: mol_type = other DNA; note = MG160-51_cloned_into_spCas9(H840A)_tethered_plasmid
ccagtccgttttgaaaactattctcactctttcgacctgaacggaaaaccagtgttcgctcctagtaaactcggccggcgaattggaaatgacatcaaagataaggtagaaaatgcgttcgctttcgaagatttttactaccatctccgcaagggagggcatgtcgctggcattcactcccataggtctaatagatactattgtaaattggatattgaaaacttcttctactccgtcgcccggaatcgtgtcgttaggtcactgagggaaatctcagttccaagagcctcccactatgggaagtggtcctgtgttaaaaatccctttctgaatccttcttacgccctgccatacgggtttgtgcaatcacctatcttagctacactggtccttgcccgaagcgccctcggaaccgctctggcaaggctctcagctcatgccaatgtagccgtctacgttgatgatataactttatcatccaatgatctgcggagcctgaaagcttgttactccgagcttctggctgcctttggcgacgctaacttttctcctaacatgcttaagtgtgtggccccatgcaagaacctcaccgtgttcaattgcagtcttgtccacgaggagacactggttgagcccgctagaatagccgagtttcatagatttcctagatccgctgcatccatggaagggttcgagaggtactgcgattcagtcaggcgaggtaatgct

SEQ ID NO: 988 - DNA, 756 bp, synthetic construct
  source 1..756: mol_type = other DNA; note = MG160-52_cloned_into_spCas9(H840A)_tethered_plasmid
atcattaagtggcacactaaatttaagctgacccacgacaagtgggtgttcgttcccaatgcaaactccagggagaagggcctcgccattaagctgtttcttgttaagaagtggaagttcccatgctactactggcacctgcgggatcagggacatatcggagccatcacatcccacctggatgacctctacttctacaagttcgacttacagaacttcttttctcagattaataagtccaagataacccgcgcacttactccaatcgttggttataagagcgctagggagataaccactgagagtactgttaaaaaccccgactataattcagagaacaatatgttcattctgccctatggatttatccagagtcccataatcgccagtattgcactgcacagctccatcctggggaaatatattcaggtcttaacagagagtttcaatgtgtcaatttacatggacgacattatcatcagctcacgacaccctatcgatcccaaaattgtgactgaacttgactggtatagtcgattagctaaactgccgatccaacacgctaagacccaggggccaagtggtaagattacggtattcaatatcgatctctcttacaagagtctgatcgttactccgaagagattgaatcagtttaagaccgcctacatcgaaaccagttctgaggacgttagggcaggaatccttaattacttattaagtgtgaatgcggcattgtataaaaactttcctaat

SEQ ID NO: 989 - DNA, 768 bp, synthetic construct
  source 1..768: mol_type = other DNA; note = MG160-53_cloned_into_spCas9(H840A)_tethered_plasmid
cactcataccctagatggcatcacaagtacgaactcaaacctggggtctgggtgttcgagcccaccgaggaaacggtactgattggcaacgaaatcaaaggcgcagtgcaaaacaagtggataatcccgtacaattactatcaccttaatctggggggccacgtggccgccctcaacctccacaaaagcgacaccgtgtttgtgcacttagacatcaagaaatttttcaacaccatcaacaaatctcgcatcaccaggtcattgaaatcattatttaattatccaacctctcggaagtacgctcttttgtcaactgtcaaacaccccaataagagtcccgtgacttttatcttaccctatggcttcgtccagagccccatattggccagtctgtgtctgagacagtccgttctcggcattaaaattgacaacttgagtaagtcatccttggtgaggatcagcgtatacatggacgatataattattagtggaaaagatgaaaatctgttgagtgtcctggtgtctgaactcaaactgtccgccgacaagtctgggttcatcttgcacaaggaagaaggacctgcccggactataactgcctttaatattcgtctgtccaataataacaccgtgatcacttacgacagatataaagagctttggcacgactataatgggagtaaaaattacaacgttaagcatggcattgccacctatgtgtccacagtcaacgtcaagcaactgctcgggttagacggtcctcttatt

SEQ ID NO: 990 - DNA, 774 bp, synthetic construct
  source 1..774: mol_type = other DNA; note = MG160-54_cloned_into_spCas9(H840A)_tethered_plasmid
ccttttatcagcctttggattgatcgcttcgaaattaaacctggcagttgggtgtacatcccttccgacgagtgcatgagtctgggcaaatccctgaaaaagtttctcgaggcgcgatggactccgcctaagtactattttcaccttcaggatggcggtcacgtatcagccctgcgcgcacatttttccagcacttatttcctgcatttagacatcaaaaagtttttcggctctataaacaagtcacgagtgacacggtgtcttaagaagtacatgtcctataaggaagcaagaatagccgcatcttatagcagtgttaaaatcccaggcagccgaaatagcaaatatgagctgccctatgggttcgttcagtccccactgctggcatccatctgtttgagatcaagtcgattagggagagtgctgcaccagatctatcttgacggccatccaatttcagtgtacgtcgatgacatagttatctccggcaccgatataggggagttagagcgtattaaaaaggaaatattggaagctgccaacttttcaaaattgagtattaatgagaagaaatccgaaggcccagccgcaaaaatcacggcctttaatatagaactctctaatgggaagctggaggtaacgtatgacaggctggagtcatttgtctcagcctatctttcttccggttccgaagcacagagagacggtattctgggttatgtctctacagtgaatacgcatcagtgtactgaactgtcttcccgcctcgtaaag

SEQ ID NO: 991 - DNA, 729 bp, synthetic construct
  source 1..729: mol_type = other DNA; note = MG160-55_cloned_into_spCas9(H840A)_tethered_plasmid
gctttcaactacgaatacagtttcgagaaaaatggaaaatttatttttgtgcagaataaagatgggtttagccacgctcactcattattgaaatttatcgacgaaaatattacattcccttctaattattttcattatcgcagcgggggacacgtggctgctttacaccagcatattgccaacgcctacctgtttagaatagatattcaggatttcttctacagcatttcccgtaaccgagtcgccgctgccttgcatgaatgcggctttaggaaggctcgcacatatgctaaatggtcttgcgttagaaaccctgtgcctgggaaaccccgatacgctctgcccattggttttgtgcagagcccggcactggcttccctggtgttaatgcgaaccccaatcatgcgcgccatcgaacgcttcgcagcccgaggaatctacattagcgtttatcttgacgacattattggcagtggacccgatttagccgctgtcgaggatgcttaccgtaacattcttgcagcatgtgaacttgcagcattacccgtcaacccttctaagcttgtcgccccccagactgagattactgcctttaattgcgttgtgcgacacgggaacgcccgggtggcaccagaacgggtcgcagagttctttaatcagtcccccgttaccagtagtgtgacagcattcgaaagttattgccgttccgtagaggccaggaaccttacc

SEQ ID NO: 992 - DNA, 759 bp, synthetic construct
  source 1..759: mol_type = other DNA; note = MG160-56_cloned_into_spCas9(H840A)_tethered_plasmid
gaaacctggaagcataagtttcttctgaaagaaaagaagtgggttcacatccctagcgaggagatgatcaagtatggctctagtttgcacaagtatcttagaagaaactggagatttccgctgtattactatcacctgaggaacggagggcatgtggccgctgctaaacttcataaaagcaatgatttcttttgtctgattgacattaagtgctttttcgaatccaccagccagagcagagtcactcgcgagcttaagaaaatcatcccttacgacaaggccaggcacattgctaaactcagcaccgtgcgacttcccaatgctgtgagacataagtttgcagttccctatgggtacccacagtctcccgtgttagccaccttgtgccttcagaactctcatgccggcacagtcattgatagcttttataggtcaggcattgtgacagtttcagtgtatatggacgatataattctcagttccaaggatctcgccatactgaatcagcactttgagatcctttgcgaggccttgagaaaatctaggtatgagatcaacgtcagcaagacgcagaaaccagccactaaaatcagcgtgtttaatctcgagctggggcatcggcacttaaaggtggagtcaggtcgaatggtactgtttatccaggccttcgctaaaacccggaataagcacgagaaaaagagtatcgccaagtacgtgcatacggtaaaccccgatcaggcggagcgacacttcccaaag

SEQ ID NO: 993 - DNA, 768 bp, synthetic construct
  source 1..768: mol_type = other DNA; note = MG160-57_cloned_into_spCas9(H840A)_tethered_plasmid
tttggcacctacctccacaagttctcactccccaacggacaccaggtctttgtcccaagcgcctctgcccgccgcgatgggagcgtagtgcaagccgacattctgcagagatggcgagtgccacactatttctaccatctgcgtagcggcgggcatctggcggctgtaaaggcacaccttcacaatcgctgttttagcacccttgatataagcgggttttttgatagcgtgagccgatctaaaatctacagagccctcagatccattcggattcatcggcagaaagcttggaagattgctcaacagagcacagtcgaaaaggtgccaggaagtttcagtttgccctacggcttcgtgcagtcaccagtgctggcttccctggctttggacagatcagctctcggcagaagactggctgttctcgcacgaagtaatcacgttcaattgagctgctatgtagatgatgtagttcttagcggcgtagaggaatgcgctgtggaaagcgggaggttagccctcatagaagcagcacgcctgtcaaattttgtgatcaacaccgtgaagtcacagctgcctggccctcagattactgtattcaacatagtgctgagtaatggcgagatggcccttacgactgaccgtatgcatcagttcgaaaaggacctcattcaggcaaccgagcccgcaactgccgccattttcgcttatgtccgcagtgtaaatagtgcccagggaaaccatctgacaaatagattggctgtggccagc

SEQ ID NO: 994 - DNA, 765 bp, synthetic construct
  source 1..765: mol_type = other DNA; note = MG160-58_cloned_into_spCas9(H840A)_tethered_plasmid
aacactaagtggtctaccagatttgagcttaaaccgggaaaatgggtcttcgtgccaacacctgagatgattcaggttggaaaggaaatcaaatcagcaatcgaaatgagatggcggcctcctacgtatttctaccatctgcgtcccggtggacatgtggcggcattgaaagctcacctgggcaatgcggctttcctgagactggatatacaggatttttttggatctatcggaaggtcaagagtggcaagatgcctgaagacccgattcggtcatgactctgcgagagagtgggcacacgcctctactgtccgagatccctctggtgctgcccgctccattatcccctttgggtttgtgcagtctccaatagtggcctcattatgtctggccgagagtgcactgggaagacacttgaacactttgcatcgaagacgctctgtgaaagtgtccgtgtacgtagacgacattatcttatcaagtaaagatccagatgcagttggcgacgaattgctcgacgggctgaagaaggccggacataggagcaggctcttctttagtgccgagaagtcacaggggccaggaccaacgatcaaggcttttaatatcgagttgtgcagtaaatcaatgcgcattgaggacggcaggatggctgagtttatcgaagccctgaagtcttcagcacacccttttcaaagggctggcatcctgggctatatcgggagcgtcaatagtgaccaggccgtagaagctggccagttgggc

SEQ ID NO: 995 - DNA, 756 bp, synthetic construct
  source 1..756: mol_type = other DNA; note = MG160-59_cloned_into_spCas9(H840A)_tethered_plasmid
cccgccaaatggcttcatcggtttgagcggaaacccggaaggtgggtattcgagccaagcccagaagccagagctgatggcgttgaggtaaaagccctggttgaatcccgatggaaggcccccacgtattactttcatctgcgaaggggaggtcacgttgcagccttattgcgtcaccagcgcagcacattcttcgtgaaggtggacattgccgatttctttgggtcagtgagtcggtctcgggtcagccgagttctgaaagaattttttcctcacactgacgctagaaggatggcaacagcctccaccgtgcaacatcccgatgacgatgccagacaaatcctgccctacggcttcattcagtctcccctccttgctagtctcgcgttgcacaagtctgcactggggaaataccttgacgaattgcaccgcgagcgcagatttgtggtgaccgtgtatgtggacgatataatcatttctgggggtgatcatgtcgaactttgcttcgcactgagtgagttaaaaaccaaggcacaaagaagccggtttgtgttttcagatgacaaggagcaggggccagccgcctcaattagtgcttttaatatcggactggcaacaggatctcctctgtttatactgcccccaaagctggctgagttccgcgatgcctttcgcgcttcaccaagcgaactgcagcgcgcaggcatccaatcctacgttcgtagtgtgaaccacgctcaagccgatactctgcct

SEQ ID NO: 996 - DNA, 753 bp, synthetic construct
  source 1..753: mol_type = other DNA; note = MG160-60_cloned_into_spCas9(H840A)_tethered_plasmid
ataccatccgacaggtggctttatcggtttaagaggaaatccgggtggatttttgttcccaccccagatactctggtgtacggcaaagaaatcaaagccttgatcgagaaacgatggaaggctccaacctactactatcatttacgtcaaggcggccatgtggccgccttaaaacaccatagcagcaatgaatactttcttcacctggatataaaatccttttttggacatattaataccacccgtgtaacaagatgccttaagggcatgttgtcctatgtgaaggcacgcgagactgcaatccattccactgtgcaccatcccaaggccaagcacttgagcattttgccattcggcttcgtacagtcacctatcattgcctccgtctgcctgaggatgtccgctttgggcaactatcttcatgagctgcaccagcaggcgggcatggaggtgtcagtttacatggacgatattatcttgagtagtaacaaactggatgatctgaccgcagccctggaaaaggtggaatgggcttccgataggagcggctttccactgaacaagaaaaaacaggagggacccgataaaatggttaccgcctttaacatcgaactgagtagacataacttggacattagtgctgcacggctgacagagtttcaggagatctattatgcctctccaaaccctaatcagagggctggaatcctgaattatgttcagactattaacgcaagccaagctgcaaacttc

SEQ ID NO: 997 - DNA, 774 bp, synthetic construct
  source 1..774: mol_type = other DNA; note = MG160-61_cloned_into_spCas9(H840A)_tethered_plasmid
gaaccccgatggagctctaagtttgaaatcaagcccggtagttgggttttcgtgccgactgagacagaagtgctcttcggcacagagctcaaggcgtccattgaatccaaatggaagccaccagccttttattaccatctgcgagacggcggccacgtgaaagctcttcagtcacacgtgaaccatgaggcattcctgtatctcgacatctctaatttttttggttgtataaataggagtcgcgtgacccggtgccttaagggcatgtacagttatcagaactctcgggacattgcacaacgctcaactgtcaaaaaccctgacagctccttgaataaatacatcctcccttttggcttcgtgcagtcacctattattgcaagcctctgtctctccaaatctcgccttgggcggtttctgtctgcctccaacagacaaaggaacttcagtgtatctgtgtatatggacgatattattgtaagcgctgatgacaagaaagacctccagcaactgcttgatgagataatcccaattagcgagcagtcaaagtttttccttaataaggaaaaacaagaaggaccatcttctaagatcaccgcgtttaacattaaattaaccaactccgtgctctctgtaacatccgaaaggtttgaagagtttaagaaagcatataaagagactgaggacctgcatgtgcgacggggcatcgtcggctatgtggaaaccgttaacaaagagcaggctagtgagctgatgaaactctcttgtagttcc

SEQ ID NO: 998 - DNA, 744 bp, synthetic construct
  source 1..744: mol_type = other DNA; note = MG160-63_cloned_into_spCas9(H840A)_tethered_plasmid
gaacagaaatggcgcgatcggtttgaactcaagcccggaaggtgggtcttcgtgcccactcctgagtccgcagaacgtggagtggagataaaagccctggtagaagagcagtggaaaccaccggcctttttctaccatttgcgtcatggagggcatgtcgccgcaatcagagcgcacgttgagaataagtatttcttcagggctgacatagatgacttctttggtcgtgtaggccgaagcagagtaacgagatgtttaaaatcctattttagctatgctgaagccagagaaatgactaatgcctccgttgtgaagcatcctgcccatgggaaacacattctgccatacgggttcatccagagccctattctcgcctcagttgcccttgacatgtccaagctcggggcctgcctgagaggcctcgctaaaaagaaacaattgaaggtcagcgtatacgtggacgacataattatctcttcaaatgagttcgggctgctcaatacggctgctgatacagtcttgcatagggctgaacaagccctgttcccgattggcgctctcaaaagggaaggaccatgcgaagccatcacagcttttaacattgaactcagccagcattctctcaaaatatctaatcagaggatggatgcatttagggagcgatacctggaagctgactctgagtctgagaaggctggtatactcggttacatcgatgccgtgaatcctttgcagtatctgttc

SEQ ID NO: 999 - DNA, 765 bp, synthetic construct
  source 1..765: mol_type = other DNA; note = MG160-64_cloned_into_spCas9(H840A)_tethered_plasmid
cctctccccaagtggaattgcaagtttcagttgaaaaaggactgttgggtgttcgttcccactgaggatgccaagaaaagaggccagaagattaaggagcaaattgaatctttctggcagcctccaaggtattatttccatctccgcgatggcggccatgttaaagccctgagactccacgagtctaggaagcagtatctccatcttgatattaaggacttttttgggtgcgtcaatcggtcaaaagtcactagagccctgaagagtaggattggatatgatgccgcccgccagatagctaccaatagcaccgtaagggctccaaatgattcaggttatatattgccaagaggttttgttgaaagcccaatactcgccagcatttgtctcagaaatagccgtctcggagactatctccataagctccacgatagcgagcattatgagatcagcgtctatatggacgatataattgtctcagccgacagtgacatccttctgcaggaagctctgaccgagctggaatcaagagctaaccggtcaaaattccccttgaatacacagaagactcagggtccctgtaaacagatctcagcctttaacatcgagctctctccaggggagttgcgggtcaccacagagaggatggctaaatttttggacaattacaaaggcgcagaaagtgacgattgcagaaacggcatcctgaattacgtgaaatctgtgaaccctggtcaaagccaagcactgaaagaggaagactct

SEQ ID NO: 1000 - DNA, 750 bp, synthetic construct
  source 1..750: mol_type = other DNA; note = MG160-65_cloned_into_spCas9(H840A)_tethered_plasmid
acacataagtggacctataggtatcagctgaaagcagaccggtgggtgttcgtgcccactaacgaggccaagggagtcggcgcatctattaagcgacttgtcgaggggaagtggaaagtgccagaatattactttcacctccggaagggtgggcatgtggccgccgtgcggtctcacagcgagaacacatatttctttcgggctgacctcgacgacttttttggacgggttaatcgcagcagagtcacccgatgcctcaaaagctggtttccatatatggaggctcgtgcaatggcttcagagtcagttgttaaacgccctagcaccgaggatttcatcctgccatatggattcgtccagagtcccatattagcttcactcgctctcgatatgtcaaaacttggaaggtttcttggaaaactccaccgccgctccgatgtaaccgttagcgtttacgtggacgacataatcgtctcctgtaatgacgaagcccagctgtttcagatagcagaccttttaaaccagaaggctgacgagagtaatttccccctttccctttctaaaaaggaaggcccagcccctgagatcaccgccttcaatattgagctgtcccacggcgttatgagaataacagaggagagattggccctgctgcgagccgaatacttaagcgcgacttccgaacattctaagaacggcatctacggctacgtggagagcgtcaatattgggcagatagagaatctcgtt

SEQ ID NO: 1001 - DNA, 732 bp, synthetic construct
  source 1..732: mol_type = other DNA; note = MG160-66_cloned_into_spCas9(H840A)_tethered_plasmid
agtgtggccatccccaacttcgactacagttacctcaggaagggcaaaccggtatttgttccgactaaggttgggaggagaatcggccacgagatcaaagatgtggtcgaggatatttatgttttcgatcctatttacttccacctgcggagagggggccacgttgcagctatgcaccatcacagagacaatcattttttcgcccgtattgacatcagcaactttttctactcaatttcacgcagaagagtacagtccgccctggacagggctggagttggtaatgcccggttttatgcaaagtggagcacagtagtatcaccattcggggatccccggtacgctttaccatatgggttcgtgcagtccccaatcctggcatctctggttgtggcaactagtgacttggggaggcatctgctgaatctcccagcctctatcaaggtgggcgtgtatgtggatgacatcagcctctcaagtgatgatgaagccgagcttcatcaggcttatgacgacattcttgctgtgatcgcatctgatggtctggcagtgaacctcgccaaactgcgaccacctgctaatatcatcgatatttttaattgtgacctggcccacgggattgcatcagtcactgatgagagagtgaacgcctttcagtcttcaaacccaagcctggaagcagaaagcgcctttatagcttattgtgcttcagtggaaatgggaaaccagccc

SEQ ID NO: 1002 - DNA, 738 bp, synthetic construct
  source 1..738: mol_type = other DNA; note = MG160-67_cloned_into_spCas9(H840A)_tethered_plasmid
tccgtgaaattcgagaatttctccttttcttacctgaacgatcatggtaaacgagtgttcgttccaaatgagaaaggatatactatcggataccatgtgaaatcacttgttgagagggctaccgcgatcgaaccattctatttccatctgttagatggaggccacgttgccgccctgcacgtgcaccggaaaaaccaatatttcgcaagagctgaccttaagaattttttttacagcatttctcggaatagggttgcaagggcactgcatgagataggggtgccgaaagctggctactacgccaaatgcagctgcgtgaaaaatccgtataacgtcccatcatactcacttccatacggctttgtacagtccccaatattagctacattggtgttatctcaaagtgtgctcggcgcctttttgcagaaaattcacgacgagatcaccgtatctgtgtatatggacgacattgctatcagcagtcccactctggaacctatgaaagaagcctttaaccagctcaaaataaaaattgaagaggcgaatttccagatcaacttggaaaagaccaagaatcccttagactttatgcaaatctttaattgtaacttggaaattaaccatgtgtccgtgactcagattaggaagaaactgtttgatgaaaagattcgctccgctgaaagccgggcatcctttgacatctactgcaagtccgtggagaggggaaacaatctgtct

SEQ ID NO: 1003 - DNA, 1914 bp, synthetic construct
  source 1..1914: mol_type = other DNA; note = MG151-98_H171N_cloned_into_untethered_plasmid
gacaatattaagcaattatctgtgttgcctggactgtccgaggacccttccgcagtcggcttgcttcaggtgaaagagcagcaggtgcctattgcgactaaggcagttcatcgcagacagtataggacaaatcgggactcattattaccaattcacaaattgatccggcagctggaaagtcagggcgtcatcagcagaacccattcccccttcaacagccccatttggcctgtgaggaaggcctcaggcgaatggcgactgaccgtggactacagggggttgaatgaagtcacccctccgttaagtgcagccgtgccggatatgctggaattgcagtatgagctggaatccaaagcagctaaatggtatgctactatcgacatagccaatgcattcttttccatccctcttgccagggagtgtaggccccagttcgcctttacatggaggggcatccaatatacttggaatcgcctgcctcagggttggaagcatagtcccacaatctgcaacggcctcatccaaactgtgctcgagcaggggagcgcacctgagcacctgcagtacattgacgatattgtggtgtggggcgacaccgccgaggacgtgttcaagaaaggagagcaaattatacagatcttgctgcaggccggcttcgcaatcaaacgaagcaaggtgaaggggcccgctcaggagatccagttcttaggcattaaatggcaggacggccgccgccacatcccagcagatgtcatcgataagatcacagcaatgtcaccccccattaacaaaaaagaaacgcagtcttttctgggcgtagttggattttggaggatgcacgtcccaaactactcccttattgtgtcaccattgtatcaggtgactcgtaaaaaaaatgacttcacctggggacctgaacagcagcaggcatttgagcagattaaacatgaaatcgcccgggccgtagcactgggaccggtaaggacaggccaggatgtgaaaaacatcttatacacagctgctggcgaaaaaggtcctacatggagcctgtggcagcgtacttccggtgagactagggggcgccctctcgggttctggagccgggcttaccgggggtccgaggaatgctataccccaactgaaaaagaaatactcgcagcatatgaaggtgtgcgagcggcaagtgaagtggttggaactgagacccagctcttgctggcaccccgcctgccagtgctcaactggatgtttaaggggaaaataccctccacccaccacgcgaccgacgcaacctggtctaagtggattgcactcattacacaacgcgcccggatgggcaacttctccaggccgggcatattggaggtcataatggactggccggagggaaagaaattcgagacctcccctggcgaagaggtgtcacgagccaaagaagcgcccccttacaacgagttgcccggaaacgaaaagaagtatgcattgttcactgatggaagctgtcgcattgtgggcaaatatcggagatggaaagccgcagtatggagccctgtgcgccaggtagcagaagccacagagggaaagggggagagcagccaattcgcagaggtcaaagccgtccagcttgcactcgatgttgctgaaagggaaggctggccagtgctctatctgtataccgactcttggatggtagccaatgccctgtgggggtggttacaacagtgggaacaaaacaactggcagcggcgcggaaagccgatatggtcagccgaactttggaaggacatcgctgcccgcattaagaatatggtggtaaaagtgaggcacgtggacgcacatatgccgaaatcccgagccacggaggaacaaaagaacaaccatcatgtagaccaggccgctaagatagaagtagcc

SEQ ID NO: 1004 - DNA, 1914 bp, synthetic construct
  source 1..1914: mol_type = other DNA; note = MG151-98_K297P_cloned_into_untethered_plasmid
gacaatattaagcaattatctgtgttgcctggactgtccgaggacccttccgcagtcggcttgcttcaggtgaaagagcagcaggtgcctattgcgactaaggcagttcatcgcagacagtataggacaaatcgggactcattattaccaattcacaaattgatccggcagctggaaagtcagggcgtcatcagcagaacccattcccccttcaacagccccatttggcctgtgaggaaggcctcaggcgaatggcgactgaccgtggactacagggggttgaatgaagtcacccctccgttaagtgcagccgtgccggatatgctggaattgcagtatgagctggaatccaaagcagctaaatggtatgctactatcgacatagccaatgcattcttttccatccctcttgccagggagtgtaggccccagttcgcctttacatggaggggcatccaatatacttggaatcgcctgcctcagggttggaagcatagtcccacaatctgccacggcctcatccaaactgtgctcgagcaggggagcgcacctgagcacctgcagtacattgacgatattgtggtgtggggcgacaccgccgaggacgtgttcaagaaaggagagcaaattatacagatcttgctgcaggccggcttcgcaatcaaacgaagcaaggtgaaggggcccgctcaggagatccagttcttaggcattaaatggcaggacggccgccgccacatcccagcagatgtcatcgataagatcacagcaatgtcaccccccattaacaaaaaagaaacgcagtcttttctgggcgtagttggattttggaggatgcacgtcccaaactactcccttattgtgtcaccattgtatcaggtgactcgtcccaaaaatgacttcacctggggacctgaacagcagcaggcatttgagcagattaaacatgaaatcgcccgggccgtagcactgggaccggtaaggacaggccaggatgtgaaaaacatcttatacacagctgctggcgaaaaaggtcctacatggagcctgtggcagcgtacttccggtgagactagggggcgccctctcgggttctggagccgggcttaccgggggtccgaggaatgctataccccaactgaaaaagaaatactcgcagcatatgaaggtgtgcgagcggcaagtgaagtggttggaactgagacccagctcttgctggcaccccgcctgccagtgctcaactggatgtttaaggggaaaataccctccacccaccacgcgaccgacgcaacctggtctaagtggattgcactcattacacaacgcgcccggatgggcaacttctccaggccgggcatattggaggtcataatggactggccggagggaaagaaattcgagacctcccctggcgaagaggtgtcacgagccaaagaagcgcccccttacaacgagttgcccggaaacgaaaagaagtatgcattgttcactgatggaagctgtcgcattgtgggcaaatatcggagatggaaagccgcagtatggagccctgtgcgccaggtagcagaagccacagagggaaagggggagagcagccaattcgcagaggtcaaagccgtccagcttgcactcgatgttgctgaaagggaaggctggccagtgctctatctgtataccgactcttggatggtagccaatgccctgtgggggtggttacaacagtgggaacaaaacaactggcagcggcgcggaaagccgatatggtcagccgaactttggaaggacatcgctgcccgcattaagaatatggtggtaaaagtgaggcacgtggacgcacatatgccgaaatcccgagccacggaggaacaaaagaacaaccatcatgtagaccaggccgctaagatagaagtagcc

SEQ ID NO: 1005 - DNA, 1914 bp, synthetic construct
  source 1..1914: mol_type = other DNA; note = MG151-98_H171N_K297P_cloned_into_untethered_plasmid
gacaatattaagcaattatctgtgttgcctggactgtccgaggacccttccgcagtcggcttgcttcaggtgaaagagcagcaggtgcctattgcgactaaggcagttcatcgcagacagtataggacaaatcgggactcattattaccaattcacaaattgatccggcagctggaaagtcagggcgtcatcagcagaacccattcccccttcaacagccccatttggcctgtgaggaaggcctcaggcgaatggcgactgaccgtggactacagggggttgaatgaagtcacccctccgttaagtgcagccgtgccggatatgctggaattgcagtatgagctggaatccaaagcagctaaatggtatgctactatcgacatagccaatgcattcttttccatccctcttgccagggagtgtaggccccagttcgcctttacatggaggggcatccaatatacttggaatcgcctgcctcagggttggaagcatagtcccacaatctgcaacggcctcatccaaactgtgctcgagcaggggagcgcacctgagcacctgcagtacattgacgatattgtggtgtggggcgacaccgccgaggacgtgttcaagaaaggagagcaaattatacagatcttgctgcaggccggcttcgcaatcaaacgaagcaaggtgaaggggcccgctcaggagatccagttcttaggcattaaatggcaggacggccgccgccacatcccagcagatgtcatcgataagatcacagcaatgtcaccccccattaacaaaaaagaaacgcagtcttttctgggcgtagttggattttggaggatgcacgtcccaaactactcccttattgtgtcaccattgtatcaggtgactcgtcccaaaaatgacttcacctggggacctgaacagcagcaggcatttgagcagattaaacatgaaatcgcccgggccgtagcactgggaccggtaaggacaggccaggatgtgaaaaacatcttatacacagctgctggcgaaaaaggtcctacatggagcctgtggcagcgtacttccggtgagactagggggcgccctctcgggttctggagccgggcttaccgggggtccgaggaatgctataccccaactgaaaaagaaatactcgcagcatatgaaggtgtgcgagcggcaagtgaagtggttggaactgagacccagctcttgctggcaccccgcctgccagtgctcaactggatgtttaaggggaaaataccctccacccaccacgcgaccgacgcaacctggtctaagtggattgcactcattacacaacgcgcccggatgggcaacttctccaggccgggcatattggaggtcataatggactggccggagggaaagaaattcgagacctcccctggcgaagaggtgtcacgagccaaagaagcgcccccttacaacgagttgcccggaaacgaaaagaagtatgcattgttcactgatggaagctgtcgcattgtgggcaaatatcggagatggaaagccgcagtatggagccctgtgcgccaggtagcagaagccacagagggaaagggggagagcagccaattcgcagaggtcaaagccgtccagcttgcactcgatgttgctgaaagggaaggctggccagtgctctatctgtataccgactcttggatggtagccaatgccctgtgggggtggttacaacagtgggaacaaaacaactggcagcggcgcggaaagccgatatggtcagccgaactttggaaggacatcgctgcccgcattaagaatatggtggtaaaagtgaggcacgtggacgcacatatgccgaaatcccgagccacggaggaacaaaagaacaaccatcatgtagaccaggccgctaagatagaagtagcc

SEQ ID NO: 1006 - DNA, 1416 bp, synthetic construct
  source 1..1416: mol_type = other DNA; note = MG151-98_trim166AA_cloned_into_untethered_plasmid
gacaatattaagcaattatctgtgttgcctggactgtccgaggacccttccgcagtcggcttgcttcaggtgaaagagcagcaggtgcctattgcgactaaggcagttcatcgcagacagtataggacaaatcgggactcattattaccaattcacaaattgatccggcagctggaaagtcagggcgtcatcagcagaacccattcccccttcaacagccccatttggcctgtgaggaaggcctcaggcgaatggcgactgaccgtggactacagggggttgaatgaagtcacccctccgttaagtgcagccgtgccggatatgctggaattgcagtatgagctggaatccaaagcagctaaatggtatgctactatcgacatagccaatgcattcttttccatccctcttgccagggagtgtaggccccagttcgcctttacatggaggggcatccaatatacttggaatcgcctgcctcagggttggaagcatagtcccacaatctgccacggcctcatccaaactgtgctcgagcaggggagcgcacctgagcacctgcagtacattgacgatattgtggtgtggggcgacaccgccgaggacgtgttcaagaaaggagagcaaattatacagatcttgctgcaggccggcttcgcaatcaaacgaagcaaggtgaaggggcccgctcaggagatccagttcttaggcattaaatggcaggacggccgccgccacatcccagcagatgtcatcgataagatcacagcaatgtcaccccccattaacaaaaaagaaacgcagtcttttctgggcgtagttggattttggaggatgcacgtcccaaactactcccttattgtgtcaccattgtatcaggtgactcgtaaaaaaaatgacttcacctggggacctgaacagcagcaggcatttgagcagattaaacatgaaatcgcccgggccgtagcactgggaccggtaaggacaggccaggatgtgaaaaacatcttatacacagctgctggcgaaaaaggtcctacatggagcctgtggcagcgtacttccggtgagactagggggcgccctctcgggttctggagccgggcttaccgggggtccgaggaatgctataccccaactgaaaaagaaatactcgcagcatatgaaggtgtgcgagcggcaagtgaagtggttggaactgagacccagctcttgctggcaccccgcctgccagtgctcaactggatgtttaaggggaaaataccctccacccaccacgcgaccgacgcaacctggtctaagtggattgcactcattacacaacgcgcccggatgggcaacttctccaggccgggcatattggaggtcataatggactggccggagggaaagaaattcgagacctcccctggcgaa

SEQ ID NO: 1007 - DNA, 1599 bp, synthetic construct
  source 1..1599: mol_type = other DNA; note = MG151-98_trim177AA_cloned_into_untethered_plasmid
gctagcgccaccatgtacccctatgatgtacctgattatgcttctggcggcagcagcggcggctcaagcggaagtgaaacacctggaacttccgaaagcgctacgcctgaatcttctggtggatcttctggcggatcttccgcatgcgacaatattaagcaattatctgtgttgcctggactgtccgaggacccttccgcagtcggcttgcttcaggtgaaagagcagcaggtgcctattgcgactaaggcagttcatcgcagacagtataggacaaatcgggactcattattaccaattcacaaattgatccggcagctggaaagtcagggcgtcatcagcagaacccattcccccttcaacagccccatttggcctgtgaggaaggcctcaggcgaatggcgactgaccgtggactacagggggttgaatgaagtcacccctccgttaagtgcagccgtgccggatatgctggaattgcagtatgagctggaatccaaagcagctaaatggtatgctactatcgacatagccaatgcattcttttccatccctcttgccagggagtgtaggccccagttcgcctttacatggaggggcatccaatatacttggaatcgcctgcctcagggttggaagcatagtcccacaatctgccacggcctcatccaaactgtgctcgagcaggggagcgcacctgagcacctgcagtacattgacgatattgtggtgtggggcgacaccgccgaggacgtgttcaagaaaggagagcaaattatacagatcttgctgcaggccggcttcgcaatcaaacgaagcaaggtgaaggggcccgctcaggagatccagttcttaggcattaaatggcaggacggccgccgccacatcccagcagatgtcatcgataagatcacagcaatgtcaccccccattaacaaaaaagaaacgcagtcttttctgggcgtagttggattttggaggatgcacgtcccaaactactcccttattgtgtcaccattgtatcaggtgactcgtaaaaaaaatgacttcacctggggacctgaacagcagcaggcatttgagcagattaaacatgaaatcgcccgggccgtagcactgggaccggtaaggacaggccaggatgtgaaaaacatcttatacacagctgctggcgaaaaaggtcctacatggagcctgtggcagcgtacttccggtgagactagggggcgccctctcgggttctggagccgggcttaccgggggtccgaggaatgctataccccaactgaaaaagaaatactcgcagcatatgaaggtgtgcgagcggcaagtgaagtggttggaactgagacccagctcttgctggcaccccgcctgccagtgctcaactggatgtttaaggggaaaataccctccacccaccacgcgaccgacgcaacctggtctaagtggattgcactcattacacaacgcgcccggatgggcaacttctccaggccgggcatattggaggtcataatggactggccggagcctaggcctaagaagaaaagaaaggtgggtggttctcctaagaaaaagagaaaggtctgagaattc

SEQ ID NO: 1008 - DNA, 1914 bp, synthetic construct
  source 1..1914: mol_type = other DNA; note = MG151-98_V273K_cloned_into_untethered_plasmid
gacaatattaagcaattatctgtgttgcctggactgtccgaggacccttccgcagtcggcttgcttcaggtgaaagagcagcaggtgcctattgcgactaaggcagttcatcgcagacagtataggacaaatcgggactcattattaccaattcacaaattgatccggcagctggaaagtcagggcgtcatcagcagaacccattcccccttcaacagccccatttggcctgtgaggaaggcctcaggcgaatggcgactgaccgtggactacagggggttgaatgaagtcacccctccgttaagtgcagccgtgccggatatgctggaattgcagtatgagctggaatccaaagcagctaaatggtatgctactatcgacatagccaatgcattcttttccatccctcttgccagggagtgtaggccccagttcgcctttacatggaggggcatccaatatacttggaatcgcctgcctcagggttggaagcatagtcccacaatctgccacggcctcatccaaactgtgctcgagcaggggagcgcacctgagcacctgcagtacattgacgatattgtggtgtggggcgacaccgccgaggacgtgttcaagaaaggagagcaaattatacagatcttgctgcaggccggcttcgcaatcaaacgaagcaaggtgaaggggcccgctcaggagatccagttcttaggcattaaatggcaggacggccgccgccacatcccagcagatgtcatcgataagatcacagcaatgtcaccccccattaacaaaaaagaaacgcagtcttttctgggcaaggttggattttggaggatgcacgtcccaaactactcccttattgtgtcaccattgtatcaggtgactcgtaaaaaaaatgacttcacctggggacctgaacagcagcaggcatttgagcagattaaacatgaaatcgcccgggccgtagcactgggaccggtaaggacaggccaggatgtgaaaaacatcttatacacagctgctggcgaaaaaggtcctacatggagcctgtggcagcgtacttccggtgagactagggggcgccctctcgggttctggagccgggcttaccgggggtccgaggaatgctataccccaactgaaaaagaaatactcgcagcatatgaaggtgtgcgagcggcaagtgaagtggttggaactgagacccagctcttgctggcaccccgcctgccagtgctcaactggatgtttaaggggaaaataccctccacccaccacgcgaccgacgcaacctggtctaagtggattgcactcattacacaacgcgcccggatgggcaacttctccaggccgggcatattggaggtcataatggactggccggagggaaagaaattcgagacctcccctggcgaagaggtgtcacgagccaaagaagcgcccccttacaacgagttgcccggaaacgaaaagaagtatgcattgttcactgatggaagctgtcgcattgtgggcaaatatcggagatggaaagccgcagtatggagccctgtgcgccaggtagcagaagccacagagggaaagggggagagcagccaattcgcagaggtcaaagccgtccagcttgcactcgatgttgctgaaagggaaggctggccagtgctctatctgtataccgactcttggatggtagccaatgccctgtgggggtggttacaacagtgggaacaaaacaactggcagcggcgcggaaagccgatatggtcagccgaactttggaaggacatcgctgcccgcattaagaatatggtggtaaaagtgaggcacgtggacgcacatatgccgaaatcccgagccacggaggaacaaaagaacaaccatcatgtagaccaggccgctaagatagaagtagcc

SEQ ID NO: 1009 - DNA, 1914 bp, synthetic construct
  source 1..1914: mol_type = other DNA; note = MG151-98_S561K_cloned_into_untethered_plasmid
gacaatattaagcaattatctgtgttgcctggactgtccgaggacccttccgcagtcggcttgcttcaggtgaaagagcagcaggtgcctattgcgactaaggcagttcatcgcagacagtataggacaaatcgggactcattattaccaattcacaaattgatccggcagctggaaagtcagggcgtcatcagcagaacccattcccccttcaacagccccatttggcctgtgaggaaggcctcaggcgaatggcgactgaccgtggactacagggggttgaatgaagtcacccctccgttaagtgcagccgtgccggatatgctggaattgcagtatgagctggaatccaaagcagctaaatggtatgctactatcgacatagccaatgcattcttttccatccctcttgccagggagtgtaggccccagttcgcctttacatggaggggcatccaatatacttggaatcgcctgcctcagggttggaagcatagtcccacaatctgccacggcctcatccaaactgtgctcgagcaggggagcgcacctgagcacctgcagtacattgacgatattgtggtgtggggcgacaccgccgaggacgtgttcaagaaaggagagcaaattatacagatcttgctgcaggccggcttcgcaatcaaacgaagcaaggtgaaggggcccgctcaggagatccagttcttaggcattaaatggcaggacggccgccgccacatcccagcagatgtcatcgataagatcacagcaatgtcaccccccattaacaaaaaagaaacgcagtcttttctgggcgtagttggattttggaggatgcacgtcccaaactactcccttattgtgtcaccattgtatcaggtgactcgtaaaaaaaatgacttcacctggggacctgaacagcagcaggcatttgagcagattaaacatgaaatcgcccgggccgtagcactgggaccggtaaggacaggccaggatgtgaaaaacatcttatacacagctgctggcgaaaaaggtcctacatggagcctgtggcagcgtacttccggtgagactagggggcgccctctcgggttctggagccgggcttaccgggggtccgaggaatgctataccccaactgaaaaagaaatactcgcagcatatgaaggtgtgcgagcggcaagtgaagtggttggaactgagacccagctcttgctggcaccccgcctgccagtgctcaactggatgtttaaggggaaaataccctccacccaccacgcgaccgacgcaacctggtctaagtggattgcactcattacacaacgcgcccggatgggcaacttctccaggccgggcatattggaggtcataatggactggccggagggaaagaaattcgagacctcccctggcgaagaggtgtcacgagccaaagaagcgcccccttacaacgagttgcccggaaacgaaaagaagtatgcattgttcactgatggaagctgtcgcattgtgggcaaatatcggagatggaaagccgcagtatggagccctgtgcgccaggtagcagaagccacagagggaaagggggagagcagccaattcgcagaggtcaaagccgtccagcttgcactcgatgttgctgaaagggaaggctggccagtgctctatctgtataccgacaagtggatggtagccaatgccctgtgggggtggttacaacagtgggaacaaaacaactggcagcggcgcggaaagccgatatggtcagccgaactttggaaggacatcgctgcccgcattaagaatatggtggtaaaagtgaggcacgtggacgcacatatgccgaaatcccgagccacggaggaacaaaagaacaaccatcatgtagaccaggccgctaagatagaagtagcc

SEQ ID NO: 1010 - DNA, 1914 bp, synthetic construct
  source 1..1914: mol_type = other DNA; note = MG151-98_D46K_cloned_into_untethered_plasmid
gacaatattaagcaattatctgtgttgcctggactgtccgaggacccttccgcagtcggcttgcttcaggtgaaagagcagcaggtgcctattgcgactaaggcagttcatcgcagacagtataggacaaatcggaagtcattattaccaattcacaaattgatccggcagctggaaagtcagggcgtcatcagcagaacccattcccccttcaacagccccatttggcctgtgaggaaggcctcaggcgaatggcgactgaccgtggactacagggggttgaatgaagtcacccctccgttaagtgcagccgtgccggatatgctggaattgcagtatgagctggaatccaaagcagctaaatggtatgctactatcgacatagccaatgcattcttttccatccctcttgccagggagtgtaggccccagttcgcctttacatggaggggcatccaatatacttggaatcgcctgcctcagggttggaagcatagtcccacaatctgccacggcctcatccaaactgtgctcgagcaggggagcgcacctgagcacctgcagtacattgacgatattgtggtgtggggcgacaccgccgaggacgtgttcaagaaaggagagcaaattatacagatcttgctgcaggccggcttcgcaatcaaacgaagcaaggtgaaggggcccgctcaggagatccagttcttaggcattaaatggcaggacggccgccgccacatcccagcagatgtcatcgataagatcacagcaatgtcaccccccattaacaaaaaagaaacgcagtcttttctgggcgtagttggattttggaggatgcacgtcccaaactactcccttattgtgtcaccattgtatcaggtgactcgtaaaaaaaatgacttcacctggggacctgaacagcagcaggcatttgagcagattaaacatgaaatcgcccgggccgtagcactgggaccggtaaggacaggccaggatgtgaaaaacatcttatacacagctgctggcgaaaaaggtcctacatggagcctgtggcagcgtacttccggtgagactagggggcgccctctcgggttctggagccgggcttaccgggggtccgaggaatgctataccccaactgaaaaagaaatactcgcagcatatgaaggtgtgcgagcggcaagtgaagtggttggaactgagacccagctcttgctggcaccccgcctgccagtgctcaactggatgtttaaggggaaaataccctccacccaccacgcgaccgacgcaacctggtctaagtggattgcactcattacacaacgcgcccggatgggcaacttctccaggccgggcatattggaggtcataatggactggccggagggaaagaaattcgagacctcccctggcgaagaggtgtcacgagccaaagaagcgcccccttacaacgagttgcccggaaacgaaaagaagtatgcattgttcactgatggaagctgtcgcattgtgggcaaatatcggagatggaaagccgcagtatggagccctgtgcgccaggtagcagaagccacagagggaaagggggagagcagccaattcgcagaggtcaaagccgtccagcttgcactcgatgttgctgaaagggaaggctggccagtgctctatctgtataccgactcttggatggtagccaatgccctgtgggggtggttacaacagtgggaacaaaacaactggcagcggcgcggaaagccgatatggtcagccgaactttggaaggacatcgctgcccgcattaagaatatggtggtaaaagtgaggcacgtggacgcacatatgccgaaatcccgagccacggaggaacaaaagaacaaccatcatgtagaccaggccgctaagatagaagtagcc

SEQ ID NO: 1011 - DNA, 2127 bp, synthetic construct
  source 1..2127: mol_type = other DNA; note = MG151-98_all_mutations_cloned_into_untethered_plasmid
gctagcgccaccatgtacccctatgatgtacctgattatgcttctggcggcagcagcggcggctcaagcggaagtgaaacacctggaacttccgaaagcgctacgcctgaatcttctggtggatcttctggcggatcttccgcatgcgacaatattaagcaattatctgtgttgcctggactgtccgaggacccttccgcagtcggcttgcttcaggtgaaagagcagcaggtgcctattgcgactaaggcagttcatcgcagacagtataggacaaatcggaagtcattattaccaattcacaaattgatccggcagctggaaagtcagggcgtcatcagcagaacccattcccccttcaacagccccatttggcctgtgaggaaggcctcaggcgaatggcgactgaccgtggactacagggggttgaatgaagtcacccctccgttaagtgcagccgtgccggatatgctggaattgcagtatgagctggaatccaaagcagctaaatggtatgctactatcgacatagccaatgcattcttttccatccctcttgccagggagtgtaggccccagttcgcctttacatggaggggcatccaatatacttggaatcgcctgcctcagggttggaagcatagtcccacaatctgcaacggcctcatccaaactgtgctcgagcaggggagcgcacctgagcacctgcagtacattgacgatattgtggtgtggggcgacaccgccgaggacgtgttcaagaaaggagagcaaattatacagatcttgctgcaggccggcttcgcaatcaaacgaagcaaggtgaaggggcccgctcaggagatccagttcttaggcattaaatggcaggacggccgccgccacatcccagcagatgtcatcgataagatcacagcaatgtcaccccccattaacaaaaaagaaacgcagtcttttctgggcaaggttggattttggaggatgttcgtcccaaactactcccttattgtgtcaccattgtatcaggtgactcgtcccaaaaatgacttcacctggggacctgaacagcagcaggcatttgagcagattaaacatgaaatcgcccgggccgtagcactgggaccggtaaggacaggccaggatgtgaaaaacatcttatacacagctgctggcgaaaaaggtcctacatggagcctgtggcagcgtacttccggtgagactagggggcgccctctcgggttctggagccgggcttaccgggggtccgaggaatgctataccccaactgaaaaagaaatactcgcagcatatgaaggtgtgcgagcggcaagtgaagtggttggaactgagacccagctcttgctggcaccccgcctgccagtgctcaactggatgtttaaggggaaaataccctccacccaccacgcgaccgacgcaacctggtctaagtggattgcactcattacacaacgcgcccggatgggcaacttctccaggccgggcatattggaggtcataatggactggccggagggaaagaaattcgagacctcccctggcgaagaggtgtcacgagccaaagaagcgcccccttacaacgagttgcccggaaacgaaaagaagtatgcattgttcactgatggaagctgtcgcattgtgggcaaatatcggagatggaaagccgcagtatggagccctgtgcgccaggtagcagaagccacagagggaaagggggagagcagccaattcgcagaggtcaaagccgtccagcttgcactcgatgttgctaagagggaaggctggccagtgctctatctgtataccgacaagtggatggtagccaatgccctgtgggggtggttacaacagtgggaacaaaacaactggcagcggcgcggaaagccgatatggtcagccgaactttggaaggacatcgctgcccgcattaagaatatggtggtaaaagtgaggcacgtggacgcacatatgccgaaatcccgagccacggaggaacaaaagaacaaccatcatgtagaccaggccgctaagatagaagtagcccctaggcctaagaagaaaagaaaggtgggtggttctcctaagaaaaagagaaaggtctgagaattc

SEQ ID NO: 1012 - DNA, 1599 bp, synthetic construct
  source 1..1599: mol_type = other DNA; note MG151-98_all_mutations_trimmed_177AA_cloned_into_untethered _plasmid
gctagcgccaccatgtacccctatgatgtacctgattatgcttctggcggcagcagcggcggctcaagcggaagtgaaacacctggaacttccgaaagcgctacgcctgaatcttctggtggatcttctggcggatcttccgcatgcgacaatattaagcaattatctgtgttgcctggactgtccgaggacccttccgcagtcggcttgcttcaggtgaaagagcagcaggtgcctattgcgactaaggcagttcatcgcagacagtataggacaaatcggaagtcattattaccaattcacaaattgatccggcagctggaaagtcagggcgtcatcagcagaacccattcccccttcaacagccccatttggcctgtgaggaaggcctcaggcgaatggcgactgaccgtggactacagggggttgaatgaagtcacccctccgttaagtgcagccgtgccggatatgctggaattgcagtatgagctggaatccaaagcagctaaatggtatgctactatcgacatagccaatgcattcttttccatccctcttgccagggagtgtaggccccagttcgcctttacatggaggggcatccaatatacttggaatcgcctgcctcagggttggaagcatagtcccacaatctgcaacggcctcatccaaactgtgctcgagcaggggagcgcacctgagcacctgcagtacattgacgatattgtggtgtggggcgacaccgccgaggacgtgttcaagaaaggagagcaaattatacagatcttgctgcaggccggcttcgcaatcaaacgaagcaaggtgaaggggcccgctcaggagatccagttcttaggcattaaatggcaggacggccgccgccacatcccagcagatgtcatcgataagatcacagcaatgtcaccccccattaacaaaaaagaaacgcagtcttttctgggcaaggttggattttggaggatgttcgtcccaaactactcccttattgtgtcaccattgtatcaggtgactcgtcccaaaaatgacttcacctggggacctgaacagcagcaggcatttgagcagattaaacatgaaatcgcccgggccgtagcactgggaccggtaaggacaggccaggatgtgaaaaacatcttatacacagctgctggcgaaaaaggtcctacatggagcctgtggcagcgtacttccggtgagactagggggcgccctctcgggttctggagccgggcttaccgggggtccgaggaatgctataccccaactgaaaaagaaatactcgcagcatatgaaggtgtgcgagcggcaagtgaagtggttggaactgagacccagctcttgctggcaccccgcctgccagtgctcaactggatgtttaaggggaaaataccctccacccaccacgcgaccgacgcaacctggtctaagtggattgcactcattacacaacgcgcccggatgggcaacttctccaggccgggcatattggaggtcataatggactggccggagcctaggcctaagaagaaaagaaaggtgggtggttctcctaagaaaaagagaaaggtctgagaattc

SEQ ID NO: 1013 - DNA, 1842 bp, synthetic construct
  source 1..1842: mol_type = other DNA; note = MG151-99_I264K_cloned_into_untethered_plasmid
cgtgccgtgcaggcaattattcgaggacatgccgagatagagcctatatgcctgcctcagccgcgcaggattaccaacacgaagcagtatcggctgcctgggggacagcaggagataacaaagactgtgcaagagctggagcgcgtcggaattattagacccgctcatagtccatataacagcccaatttggcccgtacgtaagcctgatggaacttggcggatgactgttgactatcgcgaactcaataaagtgactccaccaattcacgcagccgtgcctaatatcgcaagcctcatggatacactgagccgagaaatcgagacttatcactgtgtgctggacctggcaaatgcctttttctccatcccgatcgccaaggagtctcaagaccagtttgcctttacctgggaaggaagacagtggaccttccaggtccttccacagggctacgttcacagtccgacattttgccacaacttggtcgcctccgatttggctaactggaataagcccagtacagttaagatgtttcattacatagacgaccttatgcttacaagcgattccatcgaggctcttgagaagacagttccctcactgatcacttacttgcaggaaaaagggtgggcaattaatccccagaaggtccaaggacccggtctgagcgttaagttcctgggtgttgtgtggagtggcaagacaaaagtgctccccagcgccatcatcgacaaaattcaggcattccccgtcccaacgaagccaaaacagctccaggagtttctgggtaagctcggctattggaggtcttttattccccacctcgcacagcttcttaaacccttgtatcggctcactaagaaaggccaggtgtgggattggggacgcacagagcaagaggccttccagcaagccaagattgctgtgaagcaagctcaggcacttgggatctttgaccccacactcccagccgagctggatgtgcatgtaacacaggagggcttcgggtggggcctctggcagcggcaaggttccgtgcgaatccctatcggcttctggtctcaaatctggcatggggccgaggagcgctactccatggtcgaaaagcagctgctcgccacatactcagccctccaggctgtggagcccattacacagactgctgaagtaattgttaaaactacacttcctatccagggttgggtgaaagacttgacacacattcctaagaccggcgttgctcagagccaaaccgtggcaaggtgggtagcatatctctctcaacgttcccgcctcagttccagccctctgaaggaagagctccagaagattttgggacctgtaacataccatagcgagactccagaggagatcgtcgtgacctgcccagaaaagtcacctgttcaggaaggcaaataccccattcctgaggatgcttggtacactgacggaagttctcgggggaatcccagcagatggagggcagtggcttatcacccatccactgagacaatttggtttgaagaaggggacggacagtcatctcagtgggccgagctgcgagccgtatggatggtgatcacacaggagccagggaactctgctcttaacatttgtactgactcatgggcagtttacagggggctgaccctctggatcgcacagtgggctacacaggattggactatccatgcaaggcctatttggggtaaggacatgtgggtggacatctggaacgtagtccgccataggacggtgagggcttatcacgtgagcggacaccaacctctgcagagccctggcaatgatgaggccgacaccctggccagggtcaggtggctg

SEQ ID NO: 1014 - DNA, 1842 bp, synthetic construct
  source 1..1842: mol_type = other DNA; note = MG151-99_L551K_cloned_into_untethered_plasmid
cgtgccgtgcaggcaattattcgaggacatgccgagatagagcctatatgcctgcctcagccgcgcaggattaccaacacgaagcagtatcggctgcctgggggacagcaggagataacaaagactgtgcaagagctggagcgcgtcggaattattagacccgctcatagtccatataacagcccaatttggcccgtacgtaagcctgatggaacttggcggatgactgttgactatcgcgaactcaataaagtgactccaccaattcacgcagccgtgcctaatatcgcaagcctcatggatacactgagccgagaaatcgagacttatcactgtgtgctggacctggcaaatgcctttttctccatcccgatcgccaaggagtctcaagaccagtttgcctttacctgggaaggaagacagtggaccttccaggtccttccacagggctacgttcacagtccgacattttgccacaacttggtcgcctccgatttggctaactggaataagcccagtacagttaagatgtttcattacatagacgaccttatgcttacaagcgattccatcgaggctcttgagaagacagttccctcactgatcacttacttgcaggaaaaagggtgggcaattaatccccagaaggtccaaggacccggtctgagcgttaagttcctgggtgttgtgtggagtggcaagacaaaagtgctccccagcgccatcatcgacaaaattcaggcattccccgtcccaacgaagccaaaacagctccaggagtttctgggtatcctcggctattggaggtcttttattccccacctcgcacagcttcttaaacccttgtatcggctcactaagaaaggccaggtgtgggattggggacgcacagagcaagaggccttccagcaagccaagattgctgtgaagcaagctcaggcacttgggatctttgaccccacactcccagccgagctggatgtgcatgtaacacaggagggcttcgggtggggcctctggcagcggcaaggttccgtgcgaatccctatcggcttctggtctcaaatctggcatggggccgaggagcgctactccatggtcgaaaagcagctgctcgccacatactcagccctccaggctgtggagcccattacacagactgctgaagtaattgttaaaactacacttcctatccagggttgggtgaaagacttgacacacattcctaagaccggcgttgctcagagccaaaccgtggcaaggtgggtagcatatctctctcaacgttcccgcctcagttccagccctctgaaggaagagctccagaagattttgggacctgtaacataccatagcgagactccagaggagatcgtcgtgacctgcccagaaaagtcacctgttcaggaaggcaaataccccattcctgaggatgcttggtacactgacggaagttctcgggggaatcccagcagatggagggcagtggcttatcacccatccactgagacaatttggtttgaagaaggggacggacagtcatctcagtgggccgagctgcgagccgtatggatggtgatcacacaggagccagggaactctgctcttaacatttgtactgactcatgggcagtttacagggggctgaccaagtggatcgcacagtgggctacacaggattggactatccatgcaaggcctatttggggtaaggacatgtgggtggacatctggaacgtagtccgccataggacggtgagggcttatcacgtgagcggacaccaacctctgcagagccctggcaatgatgaggccgacaccctggccagggtcaggtggctg

SEQ ID NO: 1015 - DNA, 1842 bp, synthetic construct
  source 1..1842: mol_type = other DNA; note = MG151-99_R556K_cloned_into_untethered_plasmid
cgtgccgtgcaggcaattattcgaggacatgccgagatagagcctatatgcctgcctcagccgcgcaggattaccaacacgaagcagtatcggctgcctgggggacagcaggagataacaaagactgtgcaagagctggagcgcgtcggaattattagacccgctcatagtccatataacagcccaatttggcccgtacgtaagcctgatggaacttggcggatgactgttgactatcgcgaactcaataaagtgactccaccaattcacgcagccgtgcctaatatcgcaagcctcatggatacactgagccgagaaatcgagacttatcactgtgtgctggacctggcaaatgcctttttctccatcccgatcgccaaggagtctcaagaccagtttgcctttacctgggaaggaagacagtggaccttccaggtccttccacagggctacgttcacagtccgacattttgccacaacttggtcgcctccgatttggctaactggaataagcccagtacagttaagatgtttcattacatagacgaccttatgcttacaagcgattccatcgaggctcttgagaagacagttccctcactgatcacttacttgcaggaaaaagggtgggcaattaatccccagaaggtccaaggacccggtctgagcgttaagttcctgggtgttgtgtggagtggcaagacaaaagtgctccccagcgccatcatcgacaaaattcaggcattccccgtcccaacgaagccaaaacagctccaggagtttctgggtatcctcggctattggaggtcttttattccccacctcgcacagcttcttaaacccttgtatcggctcactaagaaaggccaggtgtgggattggggacgcacagagcaagaggccttccagcaagccaagattgctgtgaagcaagctcaggcacttgggatctttgaccccacactcccagccgagctggatgtgcatgtaacacaggagggcttcgggtggggcctctggcagcggcaaggttccgtgcgaatccctatcggcttctggtctcaaatctggcatggggccgaggagcgctactccatggtcgaaaagcagctgctcgccacatactcagccctccaggctgtggagcccattacacagactgctgaagtaattgttaaaactacacttcctatccagggttgggtgaaagacttgacacacattcctaagaccggcgttgctcagagccaaaccgtggcaaggtgggtagcatatctctctcaacgttcccgcctcagttccagccctctgaaggaagagctccagaagattttgggacctgtaacataccatagcgagactccagaggagatcgtcgtgacctgcccagaaaagtcacctgttcaggaaggcaaataccccattcctgaggatgcttggtacactgacggaagttctcgggggaatcccagcagatggagggcagtggcttatcacccatccactgagacaatttggtttgaagaaggggacggacagtcatctcagtgggccgagctgcgagccgtatggatggtgatcacacaggagccagggaactctgctcttaacatttgtactgactcatgggcagtttacagggggctgaccctctggatcgcacagtgggctacacaggattggactatccatgcaaagcctatttggggtaaggacatgtgggtggacatctggaacgtagtccgccataggacggtgagggcttatcacgtgagcggacaccaacctctgcagagccctggcaatgatgaggccgacaccctggccagggtcaggtggctg

SEQ ID NO: 1016 - DNA, 1842 bp, synthetic construct
  source 1..1842: mol_type = other DNA; note = MG151-99_G34K_cloned_into_untethered_plasmid
cgtgccgtgcaggcaattattcgaggacatgccgagatagagcctatatgcctgcctcagccgcgcaggattaccaacacgaagcagtatcggctgcctaagggacagcaggagataacaaagactgtgcaagagctggagcgcgtcggaattattagacccgctcatagtccatataacagcccaatttggcccgtacgtaagcctgatggaacttggcggatgactgttgactatcgcgaactcaataaagtgactccaccaattcacgcagccgtgcctaatatcgcaagcctcatggatacactgagccgagaaatcgagacttatcactgtgtgctggacctggcaaatgcctttttctccatcccgatcgccaaggagtctcaagaccagtttgcctttacctgggaaggaagacagtggaccttccaggtccttccacagggctacgttcacagtccgacattttgccacaacttggtcgcctccgatttggctaactggaataagcccagtacagttaagatgtttcattacatagacgaccttatgcttacaagcgattccatcgaggctcttgagaagacagttccctcactgatcacttacttgcaggaaaaagggtgggcaattaatccccagaaggtccaaggacccggtctgagcgttaagttcctgggtgttgtgtggagtggcaagacaaaagtgctccccagcgccatcatcgacaaaattcaggcattccccgtcccaacgaagccaaaacagctccaggagtttctgggtatcctcggctattggaggtcttttattccccacctcgcacagcttcttaaacccttgtatcggctcactaagaaaggccaggtgtgggattggggacgcacagagcaagaggccttccagcaagccaagattgctgtgaagcaagctcaggcacttgggatctttgaccccacactcccagccgagctggatgtgcatgtaacacaggagggcttcgggtggggcctctggcagcggcaaggttccgtgcgaatccctatcggcttctggtctcaaatctggcatggggccgaggagcgctactccatggtcgaaaagcagctgctcgccacatactcagccctccaggctgtggagcccattacacagactgctgaagtaattgttaaaactacacttcctatccagggttgggtgaaagacttgacacacattcctaagaccggcgttgctcagagccaaaccgtggcaaggtgggtagcatatctctctcaacgttcccgcctcagttccagccctctgaaggaagagctccagaagattttgggacctgtaacataccatagcgagactccagaggagatcgtcgtgacctgcccagaaaagtcacctgttcaggaaggcaaataccccattcctgaggatgcttggtacactgacggaagttctcgggggaatcccagcagatggagggcagtggcttatcacccatccactgagacaatttggtttgaagaaggggacggacagtcatctcagtgggccgagctgcgagccgtatggatggtgatcacacaggagccagggaactctgctcttaacatttgtactgactcatgggcagtttacagggggctgaccctctggatcgcacagtgggctacacaggattggactatccatgcaaggcctatttggggtaaggacatgtgggtggacatctggaacgtagtccgccataggacggtgagggcttatcacgtgagcggacaccaacctctgcagagccctggcaatgatgaggccgacaccctggccagggtcaggtggctg

SEQ ID NO: 1017 - DNA, 1842 bp, synthetic construct
  source 1..1842: mol_type = other DNA; note = MG151-99_Anzalone_mut_cloned_into_untethered_plasmid
cgtgccgtgcaggcaattattcgaggacatgccgagatagagcctatatgcctgcctcagccgcgcaggattaccaacacgaagcagtatcggctgcctgggggacagcaggagataacaaagactgtgcaagagctggagcgcgtcggaattattagacccgctcatagtccatataacagcccaatttggcccgtacgtaagcctgatggaacttggcggatgactgttgactatcgcgaactcaataaagtgactccaccaattcacgcagccgtgcctaatatcgcaagcctcatggatacactgagccgagaaatcgagacttatcactgtgtgctggacctggcaaatgcctttttctccatcccgatcgccaaggagtctcaagaccagtttgcctttacctgggaaggaagacagtggaccttccaggtccttccacagggctacgttcacagtccgacattttgcaacaacttggtcgcctccgatttggctaactggaataagcccagtacagttaagatgtttcattacatagacgaccttatgcttacaagcgattccatcgaggctcttgagaagacagttccctcactgatcacttacttgcaggaaaaagggtgggcaattaatccccagaaggtccaaggacccggtctgagcgttaagttcctgggtgttgtgtggagtggcaagacaaaagtgctccccagcgccatcatcgacaaaattcaggcattccccgtcccaacgaagccaaaacagctccaggagtttctgggtaagctcggctattggaggtcttttattccccacctcgcacagcttcttaaacccttgtatcggctcactaagcccggccaggtgtgggattggggacgcacagagcaagaggccttccagcaagccaagattgctgtgaagcaagctcaggcacttgggatctttgaccccacactcccagccgagctggatgtgcatgtaacacaggagggcttcgggtggggcctctggcagcggcaaggttccgtgcgaatccctatcggcttctggtctcaaatctggcatggggccgaggagcgctactccatggtcgaaaagcagctgctcgccacatactcagccctccaggctgtggagcccattacacagactgctgaagtaattgttaaaactacacttcctatccagggttgggtgaaagacttgacacacattcctaagaccggcgttgctcagagccaaaccgtggcaaggtgggtagcatatctctctcaacgttcccgcctcagttccagccctctgaaggaagagctccagaagattttgggacctgtaacataccatagcgagactccagaggagatcgtcgtgacctgcccagaaaagtcacctgttcaggaaggcaaataccccattcctgaggatgcttggtacactgacggaagttctcgggggaatcccagcagatggagggcagtggcttatcacccatccactgagacaatttggtttgaagaaggggacggacagtcatctcagtgggccgagctgcgagccgtatggatggtgatcacacaggagccagggaactctgctcttaacatttgtactgactcatgggcagtttacagggggctgaccctctggatcgcacagtgggctacacaggattggactatccatgcaaggcctatttggggtaaggacatgtgggtggacatctggaacgtagtccgccataggacggtgagggcttatcacgtgagcggacaccaaccttggcagagccctggcaatgatgaggccgacaccctggccagggtcaggtggctg

SEQ ID NO: 1018 - DNA, 1386 bp, synthetic construct
  source 1..1386: mol_type = other DNA; note = MG151-99_trim136AA_cloned_into_untethered_plasmid
cgtgccgtgcaggcaattattcgaggacatgccgagatagagcctatatgcctgcctcagccgcgcaggattaccaacacgaagcagtatcggctgcctgggggacagcaggagataacaaagactgtgcaagagctggagcgcgtcggaattattagacccgctcatagtccatataacagcccaatttggcccgtacgtaagcctgatggaacttggcggatgactgttgactatcgcgaactcaataaagtgactccaccaattcacgcagccgtgcctaatatcgcaagcctcatggatacactgagccgagaaatcgagacttatcactgtgtgctggacctggcaaatgcctttttctccatcccgatcgccaaggagtctcaagaccagtttgcctttacctgggaaggaagacagtggaccttccaggtccttccacagggctacgttcacagtccgacattttgccacaacttggtcgcctccgatttggctaactggaataagcccagtacagttaagatgtttcattacatagacgaccttatgcttacaagcgattccatcgaggctcttgagaagacagttccctcactgatcacttacttgcaggaaaaagggtgggcaattaatccccagaaggtccaaggacccggtctgagcgttaagttcctgggtgttgtgtggagtggcaagacaaaagtgctccccagcgccatcatcgacaaaattcaggcattccccgtcccaacgaagccaaaacagctccaggagtttctgggtatcctcggctattggaggtcttttattccccacctcgcacagcttcttaaacccttgtatcggctcactaagaaaggccaggtgtgggattggggacgcacagagcaagaggccttccagcaagccaagattgctgtgaagcaagctcaggcacttgggatctttgaccccacactcccagccgagctggatgtgcatgtaacacaggagggcttcgggtggggcctctggcagcggcaaggttccgtgcgaatccctatcggcttctggtctcaaatctggcatggggccgaggagcgctactccatggtcgaaaagcagctgctcgccacatactcagccctccaggctgtggagcccattacacagactgctgaagtaattgttaaaactacacttcctatccagggttgggtgaaagacttgacacacattcctaagaccggcgttgctcagagccaaaccgtggcaaggtgggtagcatatctctctcaacgttcccgcctcagttccagccctctgaaggaagagctccagaagattttgggacctgtaacataccatagcgagactccagaggagatcgtcgtgacctgc

SEQ ID NO: 1019 - DNA, 981 bp, synthetic construct
  source 1..981: mol_type = other DNA; note = MG151-99_trim152AA_cloned_into_untethered_plasmid
cgtgccgtgcaggcaattattcgaggacatgccgagatagagcctatatgcctgcctcagccgcgcaggattaccaacacgaagcagtatcggctgcctgggggacagcaggagataacaaagactgtgcaagagctggagcgcgtcggaattattagacccgctcatagtccatataacagcccaatttggcccgtacgtaagcctgatggaacttggcggatgactgttgactatcgcgaactcaataaagtgactccaccaattcacgcagccgtgcctaatatcgcaagcctcatggatacactgagccgagaaatcgagacttatcactgtgtgctggacctggcaaatgcctttttctccatcccgatcgccaaggagtctcaagaccagtttgcctttacctgggaaggaagacagtggaccttccaggtccttccacagggctacgttcacagtccgacattttgccacaacttggtcgcctccgatttggctaactggaataagcccagtacagttaagatgtttcattacatagacgaccttatgcttacaagcgattccatcgaggctcttgagaagacagttccctcactgatcacttacttgcaggaaaaagggtgggcaattaatccccagaaggtccaaggacccggtctgagcgttaagttcctgggtgttgtgtggagtggcaagacaaaagtgctccccagcgccatcatcgacaaaattcaggcattccccgtcccaacgaagccaaaacagctccaggagtttctgggtatcctcggctattggaggtcttttattccccacctcgcacagcttcttaaacccttgtatcggctcactaagaaaggccaggtgtgggattggggacgcacagagcaagaggccttccagcaagccaagattgctgtgaagcaagctcaggcacttgggatctttgaccccacactcccagccgagctggat

SEQ ID NO: 1020 - protein, 677 aa, unidentified
  source 1..677: note = uncultivated organism;MG151-118 reverse transcriptase
TVTLEDEYRLHQEQKPPDQEIDSWLQRFPEAWAETGGLGLAKHRPAIFVEVKPGTDPVRVRQYPMPLRAREGITPHIRRLLDQGVLRACHSSWNTPLLPVHKPNSTDYRPVQDLREVNKRVMDIHPTVPNPYTLLSALHPEKQWYTVLDLKDAFFSLPLAPKSQGLFAFQWTDPERGINGQLTWTRLPQGFKNSPTLFDEALHEDLGEYRRQHPEITLLQYVDDLLIAARSPETCVQGTEDLLKTLGELGYRASATKAQICKSEVTYLGYLLKGGQRWLTKARKETVLRIPRPQSTRQVREFLGSAGFCRLWIPGFAELAKPLYQATKERQPFNWTEEAELAFQQIKTSLLSAPALGLPDVSKPFHLYVDESKGVAKAVLTQYLGPWQRPVAYLSKKLDSVAAGWPPCLQIIAATALMVRDADKLIMGQELRVITPHAIEGVLQQPPDRWMSNARLTHYQGLLLNPLRITFLPPTSLNPASLLPNPDLDAPSHECTEILAQVHGVREDLQDRLLPDTELIWFTDGSSYVHQGQRYAGAAVTSETEVIWAEPLPPGTSAQRAELIALTQALTLGAEKKLTVYTDSRYAFATAHIHGAIYRERGLLTAEGKEIKNKQEILALLTALWKPKKLAIVHCPRHQKPTTPIARGNFLADQTAKSIAKAPSQLLVLQLPDPGPQ

SEQ ID NO: 1021 - protein, 619 aa, unidentified
  source 1..619: note = uncultivated organism;MG151-119 reverse transcriptase
SIRAVQAIIRGHAEIEPICLPQPRRITNTKQYRLPGGQQEITKTVQELERVGIIRPAHSPYNSPIWPVRKPDGTWRMTVDYRELNKVTPPIHAAVPNIASLMDTLSREIETYHCVLDLANAFFSIPIAKESQDQFAFTWEGRQWTFQVLPQGYVHSPTFCHNLVARDLANWNKPSTVKMFHYIDDLMLTSDSIEALEKTVPSLITYLQEKEWAINPQKVQGPGLSVKFLGVVWSGKTKVLPSAIIDKIQAFPVPTKPKQLQEFLGILGYWRSFIPHLAQLLKPLYRLTKKGQVWDWGRTEQEAFQQAKIAVKQAQALGIFDPTLPAELDVHVTQEGFGWGLWQRQGSVRIPIGFWSQIWHGAEERYSMVEKQLLATYSALQAVEPITQTAEVIVKTTLPIQGWVKDLTHIPKTGVAQSQTVARWVAYLSQRSRLSSSPLKEELQKILGPVTYHSETPEEIVVTCPEKSPVQEGKYPIPEDAWYTDGSSRGNPSRWRAVAYHPSTETIWFEEGDGQSSQWAELRAVWMVITQEPGNSALNICTDSWAVYRGLTLWIAQWATQDWTIHARPIWGKDMWVDIWNVVRHRTVRAYHVSGHQPLQSPGNDEADTLARVRWLGST

SEQ ID NO: 1022 - protein, 650 aa, unidentified
  source 1..650: note = uncultivated organism;MG151-120 reverse transcriptase
GIAAVDTDNIKQLSVLPGLSEDPSAVGLLQVKEQQVPIATKAVHRRQYRTNRDSLLPIHKLIRQLESQGVISRTHSPFNSPIWPVRKASGEWRLMVDYRGLNEVTPPLSAAVPDMLELQYELESKAAKWYATIDIANAFFSIPLARECRPQFAFTWRGIQYTWNRLPQGWKHSPTICHGLIQTVLEQGSAPEHLQYIDDIVVWGDTAEDVFKKGEQIIQILLQAGFAIKRSKVKGPAQEIQFLGIKWQDGRRHIPADVIDKITAMSPPINKKETQSFLGVVGFWRMHVPNYSLIVSPLYQVTRKKNDFTWGPEQQQAFEQIKHEIARAVALGPVRTGQDVKNILYTAAGEKGPTWSLWQRTSGETRGRPLGFWSRAYRGSEECYTPTEKEILAAYEGVRAASEVVGTETQLLLAPRLPVLNWMFKGKIPSTHHATDATWSKWIALITQRARMGNFSRPGILEVIMDWPEGKKFETSPGEEVSRAKEAPPYNELPGNEKKYALFTDGSCRIVGKYRRWKAAVWSPVRQVAEATEGKGESSQFAEVKAVQLALDVAEREGWPVLYLYTDSWMVANALWGWLQQWEQNNWQRRGKPIWSAELWKDIAARIKNMVVKVRHVDAHMPKSRATEEQKNNHHVDQAAKIEVAQIDLD

SEQ ID NO: 1023 - protein, 677 aa, unidentified
  source 1..677: note = uncultivated organism;MG151-121 reverse transcriptase
SLSLADEHRLFESQQEPGGDMTHWVKRFPTAWAETAGTGLAKHLPPVVIQLKASALPIRVKQYPMPEEARRGIAPHIHRLIKEGVLRPCQSAWNTPLLPVRKPGSGDYRPVQDLRKVNERTEDIHPTVPNPYTLLSHLPPSQVWYTTLDLKDAFFSIPLSEISQPLFAFEWQEDGGQSGQLTWTRLPQGFKNSPTLFNEALSQDLEPFRRSHPRVTLLQYVDDLLLAAETREECIKATEHLLTELGELGYRASAKKTHICKRSVTYLGYRIADGARWLTDAMKQTILAIPSPTSTRGVREFLGSAGFCRLWIPGFAEIARPLYEATKEAPDWSWGEREQQAFDQLKDALLQAPALALPDPTRPFTLFVDEKKGVAKGVLTQQLGPWKRPVAYFSKKLDAVAAGWPPCLRIIAAIAVLVREADKLTFGQALWVTAPHPVEGILKQPPGKWMTNARLTHYQGLLLDSPRITFTDPVILNPATLLPNPELQTPVHNCKEFLSEVTQVRADLKDTPLSGCKLNWYTDGSSFFQDGARRAGAAVVDQEGNTVWSSALPPGTSAQKAELIALAEALERAKGKRVNIYTDSRYAFGTIHVHGAIYRERGFRTAEGKHLKNLAEVQRLLMAVEKPKAVAVMYVPGHQSAKTPEAVGNNRADQEAKRVAMVSPPMETGQPSTVAAI

SEQ ID NO: 1024 - protein, 681 aa, unidentified
  source 1..681: note = uncultivated organism;MG151-122 reverse transcriptase
TVSLHDEHRLHQISSPPMLDIDNWLKQYPQAWAETGGMGLAKHRPAVYIELKPGADPVRVRQYPVSLEARLGITPRIWRLLKEGILRPCQSAWNTPLLPVRKPHTNDYRPVQDLREVNKPVIDIHPTVPNPYTLLSSLAPTRTWYTVLDLKDAFFSLPLAPKGQDLFAFEWTDPEERIHGQLTWTRLPQGFKNSPTIFDEALHEDLGEFRTQHPDLTLLQYVDDLLMAVETQAACLRGTKSLLQMLGDLGYRASAKKAQICKTEVSYPGYKLKDGQRWLTEARKETVLKISTPQNARQVREFLGTAGFCRLWILGFAELARPLYEAAKESKKFQWTEATGMAFKRLKEALLSAPDLALLDLTKPFHLYIDENKGIAKGVLMQSLGPWKRPIAYLSKKLDSVAAGWPPCLRIIAAVAMLVKDANKLTWGQELYIITPHAIEGILQQPPDRWLSNARLTHYQGLLLNPARIVFQRPPPPATLNPATLLPAPDLDSPLHDCTEILAQVHGVREDLQDQPLPNAEVTWYTDGSSYIKDGIRYAGAAITTETETVWAEPLPAGTSAQRAELVALTKAPTLGKDKRLNVFTDSRYAFATAHVHGNIYRERRLLTAEGKTIQNKDEILALLKALWLPKQLAIIHCPGHQKPTTPVAKGNNLAHQVTREVALQVDCALMTTLPDPGPAS

SEQ ID NO: 1025 - protein, 650 aa, unidentified
  source 1..650: note = uncultivated organism;MG151-123 reverse transcriptase
GIAAVDTDNIKQLSALPGLSEDPSVVGLLQVKEQQVPIATKTVHRRQYRTNRDSLLPIHKLIRQLEDQGVISKTHSPFNSPIWPVRKASGEWRLTVDYRGLNEVTPPLSAAVPDMLELQYELESKAAKWYATIDIANAFFSIPLAKECRPQFAFTWRGVQYTWNRLPQGWKHSPTICHGLIQTVLEQGSAPEHLQYIDDIVVWGDTAEEVFTKGERIIQILLCAGFAIKRSKVKGPAQEIQFLGIKWQDGRRHIPTDVIDKISAMSPPTNKKETQSFLGVVGFWRMHVPNYSLIVSPLYHVTRMKNEFTWGPEQQQAFEQIKQEIARAVALGPVRMGQGIKNILYTAAGEKGPTWSLWQRASGETRGRPLGFWSRAYRGSEEGYTPTEKEILAAYEGVRAASEVIGTETQLLLAPRLPVLNWMFKGKGSSSHHATDATWSKWIALITQRARMGNLNRPGILEVIMDWPEGKKFGTPPAEEISRAKEAPPYNELPENEKTYALFTDGSCCIVGKHRRWKAAVWSPTRQVAEATEGKGESSQFAEVKAVQLALDVAERERWPMLYVYTDSWMVANALWGWLQQWEQNNWQRKGKPIWAADLWKDIAARIKNMVIKVRHVDAHVPKNRATEEQQNNHQVDRAARIEVAQIDLD

SEQ ID NO: 1026 - protein, 650 aa, unidentified
  source 1..650: note = uncultivated organism;MG151-124 reverse transcriptase
GIAAVDTEGVQQLSILPGLSEDPSAVGLLRVKEQQVPIATKTVHRRQYRTNRDSLLPIQKLIHQLENQGVISKTHSPFNSPIWPVRKASGEWRLTVDYRGLNEVTPPLSAAVPDMLELQYELESKAAKWYATIDIANAFFSIPLTKESRPQFAFTWRGIQYTWNRLPQGWKHSPTICHGLIQAALEQGGAPEHLQYIDDIIVWGNTAKEVFEKGEQIIQILLRAGFAIKRSKVKGPAQEIQFLGIKWQDGRRHIPTDVINKISAMSPPTNKKETQSFLGVVGFWRMHVPNYSLIVSPLYQVTRKKNDFMWGPEQQQAFEQIKQEIARAVALGPVRMEQDAKNILYTAAGEKGPTWSLWQRASGETRGRPLGFWSRAYRGSEECYTPTEKEILAAYEGVRAASEVIGTETQLLLAPRLPVLNWMFKGKGPSTHHATDATWSKWIALITQRARMGNLNRPGILEVIMDWPEGKKFGTPPAEEISRAKEAPPYNELPENEKTYALFTDGSCCIVGKHRRWKAAVWSPTRQVAEATEGKGESSQFAEVKAVQLALDVAERERWPMLYVYTDSWMVANALWGWLQQWEQNNWQRKGKPIWAADLWKDIAARIKNMVIKVRHVDAHVPKNRATEEQQNNHQVDRAARIEVAQIDLD

SEQ ID NO: 1027 - protein, 652 aa, unidentified
  source 1..652: note = uncultivated organism;MG151-125 reverse transcriptase
GIAAVAVEGIKQLNTLPGLSENPSAVGLLKVEEQQVPTATSTVHRRQYRTNRDAVIPIHKMIRELESQGVVSKTHSPFNSPIWPVRKSDGEWRLTVDYRALNEVTPPLSAAVPDMLELQYELESKAARWYATIDIANAFFSIPLAAECRPQFAFTWRGVQYTWNRLPQGWKHSPTICHGLIQAALEKGEAPEHLQYIDDIIVWGNTAVEVFEKGEKIIQILLRAGFAIKKSKVKGPAQEIQFLGVKWQDGRRQIPTEVINKITAMSPPTSKKETQAFLGAIGFWRMHIPEYSQIVSPLYLVTRKKNDFHWGPEQQQAFAQIKQEIAHAVALGPVRTGPEVKNVLYSAAGNHGLSWSLWQKVPDETRGRPLGFWSRSYRGSEGNYTPTEKEILAAYEGVQAASEVIGMEAQLLLAPRLPVLGWMFRGKVPSTHHASSATWSKWIALITQRARIGKLNRPGILEVITNWPEGESFGVTDEEQEPVSRAEEAPPYNQLPAEETRYALFTDGSCRIVGMNRRWKAAVWSPTRRVAEATEGEGGSSQFAELKAIQLALDIAEREKWPKLYLYTDSWMVANALWGWLERWKEANWQRRGKPIWAAEEWKDIATRLEKLPVKVRHVDAHVPRSRANEEQQNNQKVDQAAKIGVSKIDLD

SEQ ID NO: 1028 - protein, 653 aa, unidentified
  source 1..653: note = uncultivated organism;MG151-126 reverse transcriptase
GIAAVEAEGTRQLNTLPGLSENPSAVGLLKVEEQRVPIATSTVHRRQYRTNRDAVIPIHKMIRELESQGVVSKTHSPFNSPIWPVRKSDGEWRLTVDYRGLNEVTPPLSAAVPDMLELQYELESKAAKWYATIDIANAFFSIPLAAECRPQFAFTWRGVQYTWNRLPQGWKHSPTICHGLIQAALEKGEAPEHLQYIDDIIVWGNTATEVFEKGERIIQILLQAGFAIKKSKVKGPAREIQFLGVKWQDGRRQIPTEVINKITAMSPPTNKKETQAFLGAIGFWRMHIPEYSQIVSPLYLVTRKKNDFHWGPEQQQAFAQIKQEIAHAVALGPVRTGPEVKNVLYSAAGNNGLSWSLWQKVPGETRGRPLGFWSRSYRGSEANYTPTEKEILAAYEGVQAASEVIGTEAQLLLAPRLPVLGWMFKGKVPSTHHATDATWSKWIALITQRARIGNPNRPGILEIITNWPEGETFGLSSEEEEEQVTRAEEAPPYNELPESERQYALFTDGSCRIVGASRKWKAAVWSPTRQVAQAAEGEGGSSQFAELKAVQLALDIAERERWPRLYLYTDSWMVANALWGWLERWNKANWQRRGKPIWAAEEWKDIATRVEKLSVKVRHVDAHIPKSRANEEHHNNQQVDQAAKIEVSQIDLD

SEQ ID NO: 1029 - protein, 649 aa, unidentified
  source 1..649: note = uncultivated organism;MG151-127 reverse transcriptase
GVATVNAEKIKQLSTLPGLSEDPFIVGLLQVEEQQVPIATRTVHRRQYRTNRDSLAPIHELIHHLESQGVISKTHSPFNSPIWPVQKSDGGWRLTVDYRGLNEVTPPLSAAVPDVLELQYELASKAATWYATIDIANAFFSIPLAAECRPQFAFTWRGVQYTWNRLPQGWKHSPTICHGLIQTALEQGEAPEHLQYIDDIIVWGNEAEEVFEKGKRIIQILLKAGFAIKKSKVKGPAQEIQFLGIKWQDGRRHVPMEVVNKIASMSPPANKKETQAFLGLVGFWRMHIPGYSQLVSPLYRVTRKKNYFEWGPEQQQAFEHIRQEIARAVALGPVRTGPDVQNILYTAAGDHGLTWSLWQKTPGETRGRPLGFWSRGYRGSEAHYTPTEKEILAAYEGVRAASEVVGTEAYLLLAPRLPVLHWMFKGNIPSTHHATSATWSKWIALITQRARLGKSNRPGILEEIMDWPEGRDFGASPEEVARAQEAPPYNELPEDERCYALFTDGSCRVVGNHRKWKAAVWSPTRQVVEATEGEGESSQFAEVKAIQLALNIAEREKWPVLYLYTDSWMVANALWGWLQQWKKTNWQRRGKPIWAAALWQDIAARVEHITLRVRHVDAHVPKSRATEEHRNNEQVDKAAKIEIAQVDLD

SEQ ID NO: 1030 - protein, 649 aa, unidentified
  source 1..649: note = uncultivated organism;MG151-128 reverse transcriptase
GVASVNTEKVKQLSNLPGLSGDPFVVGLLRVKEQQVPIAMRTVHRRQYRTNRDPLAPIQELIRQLETQGVISKTHSPFNSPIWPVRKSDGGWRLTVDYRGLNEVTPPLSAAVPDMLELQYELESKAAKWYATIDIANAFFSIPLAEECRPQFAFTWRGVQYTWNRLPQGWKHSPTICHGLIQTALEKGDAPEHLQYIDDIIVWGNKAEEVFKKGQKVIEILLRAGFAIKKSKVKGPAQEIQFLGIKWQDGRRHVPMEVVNKIAAMSPPTNKKGTQAFLGLVRFWRMHIPGYSQLVSPLYQVTRKKNNFEWGLEQQQAFEHIKQEIARAVALGPVRTGPDVQNVLYTSTGEHGLTWSLWQKVAGETRGRPLGFWSRGYRGSEAHYTPTEKEILAAYEGIRAASEVVGTEAQLLLAPRLPVLHWMFKGNIPSTHHATSATWSKWVALITQRARLGKPNRPGILEEIMDWPEGRDFGALPEEVARAQEAPPYNELPEDERRYALFTDGSCRVVGNHRKWKAAVWSPTRQVVEATEGEGESSQFAEVKAIQLALKIAEREKWPVLYLYTDSWMVANALWGWLQEWKKTNWQRRGKPIWAAALWQDIAARVENVALKVRHVDAHVAKSRATEEHQNNEQVDKAAKIEVAQLDLD

SEQ ID NO: 1031 - protein, 570 aa, unidentified
  source 1..570: note = uncultivated organism;MG151-129 reverse transcriptase
MPIVWLTEEPVWVPQWPLPSVKLAAAKDLVKTQLELGHIQHSTSPWNTPIFVIKKKSGQWRLLHDLRAVNAQMQLMGPVQRGLPLLSAIPKDWHVITIDIKDCFFSIPLHPKDSQRFAFTLPSLNHEEPDQRYEWVVLPQGMANSPTMCQIFVAKVLSPIRQRYPSIKVVHYMDDILLAAKSESLVSEAYRDLTQSLAKAGLYIAPEKVQTGTLITYLGTTMNYNKLSPQKITIRTQDLKTLNDFQKLLGDINWIRGYLHIPNITLQPLYAILKGSPDLASPRILTEEAREALGKVEKALQHASLNRFQDTKPFQLCILATARQPTGVLWQEGPLLWIHPYVSPNKSLEHYPEAVALLALKGIQQGVQFFGQPPFSLIIPYSKEQVNVLCATLDIWAVLCCSFQGNIDNHYPAHPLIHFIKRHPIIFPKVTSSTPIPGAVNIFTDGSKTGIGAYVINDSPPVQHQFTPGNPQQVELQIVIEVFKACSFPFNLISDSVYVVQALQILETVGAISTSHNVSIYFSQLQQLITSRTEPFYPVHIRSHTSLPGPLSQGNACADAATRSQLVCLA

SEQ ID NO: 1032 - protein, 580 aa, unidentified
  source 1..580: note = uncultivated organism;MG151-130 reverse transcriptase
ANSKPLEVPTALPLKWLTEKPIWIKQWPLAEDKLQALEQLVQEQRDANHIEESTSPWNSPVFVVKKKSGKWRMVTDLRAVNKVIQPMGPLQSGLPLPSLLPKRWPLIIMDLKECFFTIPLQEKDREKFAFTVPTYNNSQPSRSYQWTVLPQGMLNSPILCQYFVNKSLEIIRKQFPKSIIYHYMDDILLSDSNKDTLESMFEEVKKVLPRWGLQIAPEKIQREDSINYLGYRIGLEKIRTQKAQIRRDRLRTLNDFQRLLGDISSLRPAVGITPDLIVHLNKTLDGDKDLNSPRKLTVEAEKELTMIEEKLQEAHVDRVNPNLSSILVILPSRISPTGILMQREDIILEWIFIPHKPSKKLKTYVEKVSELIIKGKLRLRQLAGIDPAEIIVPFTTEEIRKLWEDNEPWQRACANFLGEISSNYPKSDRLNLIKRTSWILPRIVRDAPITGARTFYTDANKSGKAGYKSEELSKVEQSPYNSVQKAELYAILMVLRDFKEPLNIVTDSQYAERVILHIETAEFIPDDTELTSLFIEVQDIIRNRLCPMYITHIRSHTGLPGPLAQGNAEIDQLLIGSVLR

SEQ ID NO: 1033 - protein, 570 aa, unidentified
  source 1..570: note = uncultivated organism;MG151-131 reverse transcriptase
MPIPWLTEEAVWVPQWPLSSEKLEAAHHLVQEQLQLGHLEPSVSPWNTPIFIIRKRSGSWRLLHDLRAVNAQMRLFGPVQRGLPLLSALPKEWKVIIIDIKDCFFSIRLNTKDKERFAFTLPAINHEQPDARFQWKVLPQGMANSPTICQLYVQQALAPIRENYPKLKIIHYMDDILLCSPQSAEVEEAYVKLTKSLETWGLNIASEKVQKSSVSKFLGATIYTDVICPQKLKIRHDQLRTLNDFQKLLGDINWLRPFLRVPTTDLKPLFKILEGDSQLTSPRSLTPEAVQAIHKVEQALMTAQLNRIQLNEPFELCILPTPGLPTAVLWQRGPLLWIHPQASQARTIEYYPAAIANLALRGVKNSFTYFGKAPATIITPYNMEQIQILCAMNDDWAILAYSFSGTFDNHFPKHPLINFARNHPLVFPRVTSLTPLPHGKTVYTDGSKTGTGAYVHDGEVVTKNYTPNTPQIVECHIVLEVLQTFHEPLNIVSDSSYVVNAVNSLEVAGLIKASSSVATLFKQIQSQLLLRRSPLYMTHIRAHSGLPGPMTQGNHLADIATRSIAFPLLD

SEQ ID NO: 1034 - protein, 579 aa, unidentified
  source 1..579: note = uncultivated organism;MG151-132 reverse transcriptase
MRAIDLPVPHADKIKWKSDSPVWVDQWPLNQEKLTAATKLVQEQLAAGHLESTTSPWNTPIFVIKKKSGTWRLLQDLREINKTMFSMGALQPSLPSPIAIPANYFKIIIDLKDCFFTIPLHPQDRERFAFSIPVTNFKGPMHRYQWKVLPQGMANSPTLCQKFVAQAVDPLRTRWPSIYIIHYMDDILLAGASRTQVLTCSQELTTHLTFFGLQIAPDKIQLTDPYYYLGFELTWNKITTQKIRLRTSHLHTLNDFQKFLGDINWLRPYLKLTTGELKPLFDILQGDPNPSSPRDLSTEAKETLNIVETAIQQQQITFLSYDRPFALIICNTPHTPTGVLWQNNPLLWIHLPSSPSKVLITYPLLVAKIIKMGREKSRQYFGRDPDQLIIPYTKEQIDWLLQNEDDWIIALTSFQGKIDNHYPSHKLLQFSRLHPFIFPKITSSTPLDNAPLVFSDGSSSGIAAYVINSQSHSIQSPFKSAQLVELFAILQIFKVLSQVPFNLYTDSAYIAYSVPILETVPHIKPSTNAVSLFQQLQTFILRRQAPFYIGHLRAHTDLPGPLSQGNALADQNTRFTYSV

SEQ ID NO: 1035 - protein, 590 aa, unidentified
  source 1..590: note = uncultivated organism;MG151-133 reverse transcriptase
VSAPDPPVPHADKIIWETQIPVWVDQWPLTQEKLKAASMLVQEQLAADHVEPSTSPWNTPIFVIKKKSGKWRLLQDLRAINRVMRPMGALQPGIPTPVAIPKDYYKMVIDLKDCFFTIPLHPEDRPYFAFSLPRINFQGPMQRFQWKVLPQGMANSPSLCQKYVAQAVDPVRKRWPQIYILHYMDDLLIAAPDTHNLNGCYLDLYKALTTLGLQIAPDKVQTQDPYTYLGLQLQGNQIQTPKIQLRVDHLHTLNDFQKLMGDIQWLRPYLKLPTCVLLPLNDILKGDSHPTSPRKLTPEAQQALNQVTKAITQQFVTQISYNLPLILVILHTPHTPTGIFWQRDPHFKNKGCPLFWVHLPTTSSKVITVYPAQVASVIVKGRLLSRQHFGKDPDKILMPYTKDQTQFLLQTEDEWSIALSGFLGTIDNHLPSDPLLHFAQLHPFIFPKITQKAPIPQALTVFTDGSSNGCAVFVVGNQPTTFETAYQSAQLVELFAIAQVFITFLDKPVNIYTDSAYIAHSVPLLEISPAIKASSNAAFLFHQLQQLIQTRRHPFFLGHIRAHSDLPGPLTQGNAQADAATCSIFPIFAS

SEQ ID NO: 1036 - protein, 577 aa, unidentified
  source 1..577: note = uncultivated organism;MG151-134 reverse transcriptase
MRPRPLSITWLSDDPVWIEQWPLTKDKLQAATLLVQEQLRVGHIVPSTSPWNTPIFVIRKGSGKWRLLQDLRAINNTMQPMGPLQPGLPFPTAIPKDWHLIILDLKDCFFSIPLAPQDCKRFAFSLPSINFREPYQRFEWTVLPQGMANSPTMCQYFIAKILQPFRQQFPNFYLVHYMDDILLAGPDRKALFRSYEVLQSLLKGAGLIIAPEKVQIQYPYNYLGYTINKVGITPQRPQFQVNQLKTLHQWQTFLGEIQWLRPSLHVPTGELKPLYDLLRGDPSPTSPRKPTPEALKALRLIETALQEMQVMQVDYSQSLLFIVLPSKLTPTGVFWQTGPIYWVHLPASPSRVLIPFHDLVIQLVWKAKYLGDALFGKTFDVLILPYNQDILSKLRQEHDLWCLFFCSFMGQVDNHYPKSRLLESLKTCPIIFPKILKKDPLPGAQTVFTDGAKNGFAVVSDGTQVIRKRVADCSAQKAEVAALILALQTYSSVPLNVFTDSLYIARLASAIETAPYIGKQSTIMDQLQTVQLLIWARADPLFIGHIRSHSGLPGPLAAGNAMADAATHATNFIYTIT

SEQ ID NO: 1037 - protein, 581 aa, unidentified
  source 1..581: note = uncultivated organism;MG151-135 reverse transcriptase
FREMSIAPSFALPLKWLTKQPIWVEQWPLTKEKLSALEKIIQQLLKEDRIETSVSPWNSPIFVIKKKSGKWRLITDLRKINTVIQPMGALQPGLPQPSMIPKNWFLTIIDLKDCFFTIPLQPQDREKFAFTIPSLNNNKPTSRYQWKVLPQGMLNSPTLCQFYVNQPLERLRSLFPSALVIHYMDDVLFAHYDKIKLKQLVTKAESVLGEYGLIIAKEKIQEQPPFEYLGNKLDQTRIWPQKVELRRDCLHTLNDFQKLLGDINWLRPSLGIPTYALKNLFLTLQGDPALDSPRSLSTLAEKELLQIEQIMQTAYLDRIDPNEPVVLVVFPSQHSPTGIFWQKDLILEWLFLPNKEQERLSTYLDKICKIIAKGRLRLRHLIGTDPQQIIVPLTQQEILCQYKLSNEWQLALQDFLGDIHNNFPKNKRLQFLKKTQWILPSIVKTKPIPKADTFFTDANKLGMAGYTGPKTRVEQTPFRSVQKAELAAIIMLLQDYSDPLNLVTDSQYAEHTVKEIETATLIADGSEIVQLFSILQLLIRNRSQPIFITHIRAHTALPGPMSAGNEQIDRLLIGNVQAAMD

SEQ ID NO: 1038 - protein, 1258 aa, unidentified
  source 1..1258: note = uncultivated organism;MG176-1-R4 transposition protein
MTDSASEAVARRTRRALAKQPVGSSISSGSDSITSAGIHVTAAPKLIDQSDEATCSRKGFDVSAPASQGRSDLWSDQEMKELQRLVGSNTGPTGKVSWVNVAEAWKSLGHSERTKGGLTAKWRDMKSRSATELVQGGTPSIQGDTGKTSSVKGTLDSSAQAVPAARTQRVIVQAVNKDNDKPESGNQRDGTAVASVDIQKKEDIANIFKEKLKLSKWIGCKPNSRKSPPRISGRSSLPLINEVDRLIERELWSKTGRKLSWRWLSIVVYAGAMTVSEIDGRQRLERKERTKEWFRNSYREIERLQSIIGKSTAELNRRCTSTGPTSKQLSNMKMLRKRYGVETFAEITSLVEKLKIRLKLLRSRVALRKEDERRCRLRLTPTKVLFRGKSGVGQGEKDMVNIESVRKYWKGIVGRAKPFDYRKNEDMVAWSATLKEIKTEDNPSDCLSQEIWGEATLKAKPWKAHGPDGLQGFWWKAFKTANAALYQLARRHLTTGDPLPEEWISEGRIILLHKSGPKHDPSNYRPIACLNTCYKLLTSYVALIVDRHVRRYNILPLEQVALRRGVWGCTHALMLDQTLVADAQYQKQRPISLAWIDYAKAFDSVPHAYIKWLLRVVKIPIMMRKFVCKLIGSWTVKYEAKDTRGCTHRSNSLSIKSGVLQGDSFSPLLFCLAMAPISYSLNSTKIGYGTVTGLSKGLQLKLSHLFYMDDLKLYADSRENLTKLLNRVEAISAAISMKLNTKKCAKAHFIPKRMGDDNKEESNSSEGCLDIPTLEGGSTYKYLGIEQTFGLHESDTWDRVEEKCSIVVRQIWESDLTFRQKVHSYNTKVIPALRYVVMNSVRGLGKYQSVLKRAEKFDIKTRRILVQLKVRYKASCVSRLYLATELGGYGLKSVRDALLEGTIYSWAYLCTSEELRTSLHLFSSMAGRSKRSVISDAGSVLKTYRIHAEPVSDAAAVIVAGTRFTDARALARYVMGEIRTGNNITRLKEWEVKELGGRVLRSGNIDRRASFVWLQTGKLSSTAVRNVIAAQEGCLLTRAHPSCVNVDKSCRGCGKSLETVEHLMTGCSKWLTTLYIDRHDSVARNLHYRICIKFDLKPPHYSQRVESVMENDRVKVYWGQPVQTKSIVRHNKPDIVVFEKKEQQCTIIEVAVSWFTGIARQIDVKTNRYCVNGNWEEVLQLPYPRGDNLQRELQTEGWKVKFLPVVIGACGEVLESLAVQISDALGISTDKAEDCIERMERSAVLGSSRIIKNHLSLG

SEQ ID NO: 1039 - protein, 293 aa, unidentified
  source 1..293: note = uncultivated organism;MG160-49 reverse transcriptase
MLIDKFSKEIGLPRPSVQKIAASANYLYKHYTIPKRSGGERDIYHPTPRLKLVQRWITRHVIRDLPVSDAAMAYRKGKSITDNARLHAGKRFLLKMDFTDFFPSIKARDLQPILTSRGYDPEDVNFILTICFKSGSLTIGAPSSPAVSNIVMFALDQEFKGIADRRKLTYSRYADDLTFAGNVRGNLIEAKKDVERLIGTWASPNLTLNQRKTVLVSSAHRQKVTGITLTTDGEISIGREKKRELRAIVHRSTYQKLEPEVEAYVQGWLAYANSIEPKFVDSLRKKFDTYLDF

SEQ ID NO: 1040 - protein, 232 aa, unidentified
  source 1..232: note = uncultivated organism;MG160-50 reverse transcriptase
VYVQTEKYKDFGRKLITKVRAKWTPPPYFFHLAKGGHVEAARLHIDSKYFAHLDLKKFFNSCRRSRVVRALKSIGFKQRQALECSSDSLVRLGGERVIPYGFTQSPILASICLHHSALGNEMACLHDEGKKVSLYVDDIVVSGDTEAEVEGLVDRLIKSAENARFALAHDKVSGTQPEITPFNLVLANNKLELSAEQYAEFKTRVAADPASAVAQGTIRYAGFVNPSQAATL

SEQ ID NO: 1041 - protein, 244 aa, unidentified
  source 1..244: note = uncultivated organism;MG160-51 reverse transcriptase
MPVRFENYSHSFDLNGKPVFAPSKLGRRIGNDIKDKVENAFAFEDFYYHLRKGGHVAGIHSHRSNRYYCKLDIENFFYSVARNRVVRSLREISVPRASHYGKWSCVKNPFLNPSYALPYGFVQSPILATLVLARSALGTALARLSAHANVAVYVDDITLSSNDLRSLKACYSELLAAFGDANFSPNMLKCVAPCKNLTVFNCSLVHEETLVEPARIAEFHRFPRSAASMEGFERYCDSVRRGNA

SEQ ID NO: 1042 - protein, 253 aa, unidentified
  source 1..253: note = uncultivated organism;MG160-52 reverse transcriptase
MIIKWHTKFKLTHDKWVFVPNANSREKGLAIKLFLVKKWKFPCYYWHLRDQGHIGAITSHLDDLYFYKFDLQNFFSQINKSKITRALTPIVGYKSAREITTESTVKNPDYNSENNMFILPYGFIQSPIIASIALHSSILGKYIQVLTESFNVSIYMDDIIISSRHPIDPKIVTELDWYSRLAKLPIQHAKTQGPSGKITVFNIDLSYKSLIVTPKRLNQFKTAYIETSSEDVRAGILNYLLSVNAALYKNFPN

SEQ ID NO: 1043 - protein, 257 aa, unidentified
  source 1..257: note = uncultivated organism;MG160-53 reverse transcriptase
MHSYPRWHHKYELKPGVWVFEPTEETVLIGNEIKGAVQNKWIIPYNYYHLNLGGHVAALNLHKSDTVFVHLDIKKFFNTINKSRITRSLKSLFNYPTSRKYALLSTVKHPNKSPVTFILPYGFVQSPILASLCLRQSVLGIKIDNLSKSSLVRISVYMDDIIISGKDENLLSVLVSELKLSADKSGFILHKEEGPARTITAFNIRLSNNNTVITYDRYKELWHDYNGSKNYNVKHGIATYVSTVNVKQLLGLDGPLI

SEQ ID NO: 1044 - protein, 259 aa, unidentified
  source 1..259: note = uncultivated organism;MG160-54 reverse transcriptase
MPFISLWIDRFEIKPGSWVYIPSDECMSLGKSLKKFLEARWTPPKYYFHLQDGGHVSALRAHFSSTYFLHLDIKKFFGSINKSRVTRCLKKYMSYKEARIAASYSSVKIPGSRNSKYELPYGFVQSPLLASICLRSSRLGRVLHQIYLDGHPISVYVDDIVISGTDIGELERIKKEILEAANFSKLSINEKKSEGPAAKITAFNIELSNGKLEVTYDRLESFVSAYLSSGSEAQRDGILGYVSTVNTHQCTELSSRLVK

SEQ ID NO: 1045 - protein, 244 aa, unidentified
  source 1..244: note = uncultivated organism;MG160-55 reverse transcriptase
MAFNYEYSFEKNGKFIFVQNKDGFSHAHSLLKFIDENITFPSNYFHYRSGGHVAALHQHIANAYLFRIDIQDFFYSISRNRVAAALHECGFRKARTYAKWSCVRNPVPGKPRYALPIGFVQSPALASLVLMRTPIMRAIERFAARGIYISVYLDDIIGSGPDLAAVEDAYRNILAACELAALPVNPSKLVAPQTEITAFNCVVRHGNARVAPERVAEFFNQSPVTSSVTAFESYCRSVEARNLT

SEQ ID NO: 1046 - protein, 254 aa, unidentified
  source 1..254: note = uncultivated organism;MG160-56 reverse transcriptase
METWKHKFLLKEKKWVHIPSEEMIKYGSSLHKYLRRNWRFPLYYYHLRNGGHVAAAKLHKSNDFFCLIDIKCFFESTSQSRVTRELKKIIPYDKARHIAKLSTVRLPNAVRHKFAVPYGYPQSPVLATLCLQNSHAGTVIDSFYRSGIVTVSVYMDDIILSSKDLAILNQHFEILCEALRKSRYEINVSKTQKPATKISVFNLELGHRHLKVESGRMVLFIQAFAKTRNKHEKKSIAKYVHTVNPDQAERHFPK

SEQ ID NO: 1047 - protein, 257 aa, unidentified
  source 1..257: note = uncultivated organism;MG160-57 reverse transcriptase
MFGTYLHKFSLPNGHQVFVPSASARRDGSVVQADILQRWRVPHYFYHLRSGGHLAAVKAHLHNRCFSTLDISGFFDSVSRSKIYRALRSIRIHRQKAWKIAQQSTVEKVPGSFSLPYGFVQSPVLASLALDRSALGRRLAVLARSNHVQLSCYVDDVVLSGVEECAVESGRLALIEAARLSNFVINTVKSQLPGPQITVFNIVLSNGEMALTTDRMHQFEKDLIQATEPATAAIFAYVRSVNSAQGNHLTNRLAVAS

SEQ ID NO: 1048 - protein, 256 aa, unidentified
  source 1..256: note = uncultivated organism;MG160-58 reverse transcriptase
MNTKWSTRFELKPGKWVFVPTPEMIQVGKEIKSAIEMRWRPPTYFYHLRPGGHVAALKAHLGNAAFLRLDIQDFFGSIGRSRVARCLKTRFGHDSAREWAHASTVRDPSGAARSIIPFGFVQSPIVASLCLAESALGRHLNTLHRRRSVKVSVYVDDIILSSKDPDAVGDELLDGLKKAGHRSRLFFSAEKSQGPGPTIKAFNIELCSKSMRIEDGRMAEFIEALKSSAHPFQRAGILGYIGSVNSDQAVEAGQLG

SEQ ID NO: 1049 - protein, 253 aa, unidentified
  source 1..253: note = uncultivated organism;MG160-59 reverse transcriptase
MPAKWLHRFERKPGRWVFEPSPEARADGVEVKALVESRWKAPTYYFHLRRGGHVAALLRHQRSTFFVKVDIADFFGSVSRSRVSRVLKEFFPHTDARRMATASTVQHPDDDARQILPYGFIQSPLLASLALHKSALGKYLDELHRERRFVVTVYVDDIIISGGDHVELCFALSELKTKAQRSRFVFSDDKEQGPAASISAFNIGLATGSPLFILPPKLAEFRDAFRASPSELQRAGIQSYVRSVNHAQADTLP

SEQ ID NO: 1050 - protein, 252 aa, unidentified
  source 1..252: note = uncultivated organism;MG160-60 reverse transcriptase
MIPSDRWLYRFKRKSGWIFVPTPDTLVYGKEIKALIEKRWKAPTYYYHLRQGGHVAALKHHSSNEYFLHLDIKSFFGHINTTRVTRCLKGMLSYVKARETAIHSTVHHPKAKHLSILPFGFVQSPIIASVCLRMSALGNYLHELHQQAGMEVSVYMDDIILSSNKLDDLTAALEKVEWASDRSGFPLNKKKQEGPDKMVTAFNIELSRHNLDISAARLTEFQEIYYASPNPNQRAGILNYVQTINASQAANF

SEQ ID NO: 1051 - protein, 259 aa, unidentified
  source 1..259: note = uncultivated organism;MG160-61 reverse transcriptase
MEPRWSSKFEIKPGSWVFVPTETEVLFGTELKASIESKWKPPAFYYHLRDGGHVKALQSHVNHEAFLYLDISNFFGCINRSRVTRCLKGMYSYQNSRDIAQRSTVKNPDSSLNKYILPFGFVQSPIIASLCLSKSRLGRFLSASNRQRNFSVSVYMDDIIVSADDKKDLQQLLDEIIPISEQSKFFLNKEKQEGPSSKITAFNIKLTNSVLSVTSERFEEFKKAYKETEDLHVRRGIVGYVETVNKEQASELMKLSCSS

SEQ ID NO: 1052 - protein, 249 aa, unidentified
  source 1..249: note = uncultivated organism;MG160-63 reverse transcriptase
MEQKWRDRFELKPGRWVFVPTPESAERGVEIKALVEEQWKPPAFFYHLRHGGHVAAIRAHVENKYFFRADIDDFFGRVGRSRVTRCLKSYFSYAEAREMTNASVVKHPAHGKHILPYGFIQSPILASVALDMSKLGACLRGLAKKKQLKVSVYVDDIIISSNEFGLLNTAADTVLHRAEQALFPIGALKREGPCEAITAFNIELSQHSLKISNQRMDAFRERYLEADSESEKAGILGYIDAVNPLQYLF

SEQ ID NO: 1053 - protein, 256 aa, unidentified
  source 1..256: note = uncultivated organism;MG160-64 reverse transcriptase
MPLPKWNCKFQLKKDCWVFVPTEDAKKRGQKIKEQIESFWQPPRYYFHLRDGGHVKALRLHESRKQYLHLDIKDFFGCVNRSKVTRALKSRIGYDAARQIATNSTVRAPNDSGYILPRGFVESPILASICLRNSRLGDYLHKLHDSEHYEISVYMDDIIVSADSDILLQEALTELESRANRSKFPLNTQKTQGPCKQISAFNIELSPGELRVTTERMAKFLDNYKGAESDDCRNGILNYVKSVNPGQSQALKEEDS

SEQ ID NO: 1054 - protein, 251 aa, unidentified
  source 1..251: note = uncultivated organism;MG160-65 reverse transcriptase
MTHKWTYRYQLKADRWVFVPTNEAKGVGASIKRLVEGKWKVPEYYFHLRKGGHVAAVRSHSENTYFFRADLDDFFGRVNRSRVTRCLKSWFPYMEARAMASESVVKRPSTEDFILPYGFVQSPILASLALDMSKLGRFLGKLHRRSDVTVSVYVDDIIVSCNDEAQLFQIADLLNQKADESNFPLSLSKKEGPAPEITAFNIELSHGVMRITEERLALLRAEYLSATSEHSKNGIYGYVESVNIGQIENLV

SEQ ID NO: 1055 - protein, 245 aa, unidentified
  source 1..245: note = uncultivated organism;MG160-66 reverse transcriptase
MSVAIPNFDYSYLRKGKPVFVPTKVGRRIGHEIKDVVEDIYVFDPIYFHLRRGGHVAAMHHHRDNHFFARIDISNFFYSISRRRVQSALDRAGVGNARFYAKWSTVVSPFGDPRYALPYGFVQSPILASLVVATSDLGRHLLNLPASIKVGVYVDDISLSSDDEAELHQAYDDILAVIASDGLAVNLAKLRPPANIIDIFNCDLAHGIASVTDERVNAFQSSNPSLEAESAFIAYCASVEMGNQP

SEQ ID NO: 1056 - protein, 247 aa, unidentified
  source 1..247: note = uncultivated organism;MG160-67 reverse transcriptase
MSVKFENFSFSYLNDHGKRVFVPNEKGYTIGYHVKSLVERATAIEPFYFHLLDGGHVAALHVHRKNQYFARADLKNFFYSISRNRVARALHEIGVPKAGYYAKCSCVKNPYNVPSYSLPYGFVQSPILATLVLSQSVLGAFLQKIHDEITVSVYMDDIAISSPTLEPMKEAFNQLKIKIEEANFQINLEKTKNPLDFMQIFNCNLEINHVSVTQIRKKLFDEKIRSAESRASFDIYCKSVERGNNLS

SEQ ID NO: 1057 - protein, 246 aa, unidentified
  source 1..246: note = uncultivated organism;MG160-68 reverse transcriptase
MLENYECKFQTRGKIIFVPNERSVRKGRRILKFFSKFEFPDYFYHYKSGGHVAALHAHLENKLFFKIDIQNFYYSIARMRVTRALRSWGYPGANTLAKWSCVANPYPGPKHVLPIGFVQSPLLASLVLLKSPVAEAIERAIKNGVCISVYLDDFVGSHNDPAVLEAAYGDIRDTCVAARLVPNPAKLLAPRAAITAFNCDLTEGSILVTTERVAKYYASTARTVETDAAFEEYRSLIASANKAAGI

SEQ ID NO: 1058 - protein, 274 aa, unidentified
  source 1..274: note = uncultivated organism;MG160-69 reverse transcriptase
MRNVARSFMRDGKRFFVPSNSYWAWSDHSEGLTAASQGRRGWLELKQLILEQWTPHSSNATFALGAHVAALRPHENNTWLAVIDLENFYDHVTRAKVHRALASIGFSRAAAFKVAGESTIRQGEKYLLPRGFRQSPMLAALVLEQSLFGSYLRKGFYRSTVTVFSDDIILSSNDRDELQEEYRHIVNLLRRSNFPINPIKSQPPRREVIVFNMRVSQDGLSFTDVRMWKFLNRAVELVLDKPLIYNKLFGNYLSSINSEQARRLRAWVRARRAG

SEQ ID NO: 1059 - protein, 251 aa, unidentified
  source 1..251: note = uncultivated organism;MG160-70 reverse transcriptase
MNPKWSSKFELKPGRWVFVPTPASTATGEWIKAQIEAHWTPPDYYYHLRSGGHVAALKSHIGHTNFLHLDVQDFFGSVNKTRVTRCLKTKVGYALAREWANASTVTHPKNKNRSIIPYGFVQSPIIAALCLAESALGISLAKIRKKKGAVVSVYVDDIIVSSNDSSLCLSLLAMLKTAADRARFTLNPEKERGPASQVTAFNIVLSSSSMQIESARLQEFVEALAKASNQAQRMGILSYVSSVNAEQGNAL

SEQ ID NO: 1060 - protein, 244 aa, unidentified
  source 1..244: note = uncultivated organism;MG160-71 reverse transcriptase
MIENYKFKYRSRGKYFFVPNEKCERRGRRMIQFFSKRVDFPDYFFHCKKGGHVAALHDHLANALFFKIDIQNFYYSIARMRVTRALRDWRYPGAGTFAKWSCVVNPGPGPKFALPIGFVQSPLLASLVLMKSPVNDAIERARANGVCISVYLDDFIGSHNEIDVLTAAYEDIRDTCVAAGFIPNPGKLVPPRAAITAFNCELTNGSALVTAGRINKYLASPDRTAMSDAGFADYQALVAARNVP

SEQ ID NO: 1061 - protein, 248 aa, unidentified
  source 1..248: note = uncultivated organism;MG160-72 reverse transcriptase
MFQNYEFKFISRGKHIFVQLKANADKAVKSLSRLTGKVSFPVYFYHYQPGGHVAALHHHMQSRFFVKIDISNFYYSISRNRVAAALHSIGYAKSRTFAKWSCVKNPLKKPTYSLPIGFVQSPFLATLVILRSPIAAVLDSAEKEGLRISVYFDDFVISGDDEVLLGKYAQLLVDAMDVSNFHINNKKSVIAPSKQIVVFNCSLENLRTVVTKERVDAFLAQAPTEAALKAFEEYVGRVGAQNLKREAP

SEQ ID NO: 1062 - protein, 258 aa, unidentified
  source 1..258: note = uncultivated organism;MG160-73 reverse transcriptase
MVINYHKKIFLGNSKYAYEQTEDFYNRGLIIIEKILKLWTPPSYYFHYQKGGHLAALKAHEASNFFTRIDLSRFYYRVTKNKIIRSLVKAGFSFKEANEIAIESVVKTAEGYCLPYGFVQSSLISSLVLSFSGLGGALRYEANSFNVSVYVDDILISQKGKLSEIRNFSETVCIAAAHSNFPINLEKTEIGKTEIEIFNIDLAQNSKSICDKRLGEFLVEVKSSDSDERANSMIAYVRQVNVIQSNLLYRARYGHIPN

SEQ ID NO: 1063 - protein, 259 aa, unidentified
  source 1..259: note = uncultivated organism;MG160-74 reverse transcriptase
MKNFSSKIPLGNNKYAYEQEPNFKVLGEELTDRVLSVWKPPSIFYHLKDGGHVAALRKHLENNHFSNFDVSRFFYRVTKNKILRSLIKHGFSFEDANFAASHSVVKSPDGYHLPYGFTQSPILASLVLHSSRAGKFLRRIDKDVAVSVYVDDIILSHHDDPKKLDETSRQLVEQFGLSGFPISEEKLQVCEPRITSFNVEIGYRHSVITDDRMSHFDEQIRENIDNPFSTEGIQRYVAAINDQQGREIGEMIKQASGRS

SEQ ID NO: 1064 - protein, 235 aa, unidentified
  source 1..235: note = uncultivated organism;MG160-75 reverse transcriptase
MPEFRASGENIVEEIRKRWKPPRTYFHLQKGGHVAAVRKHSQNNYFSRFDISRFFFRVKKNMIIKALKSVGFSFLDANSIAYESVVHDGDGFSLPYGFVQSPILASLCLDKSTAGNFLRKLQRDVTLSVFVDDIILSHGNALEKLSLASHQLTTAFAGSGFPVSEAKCEICKERITSFNIHVSHLHLEVTGERMEQFDSDLRLNRENTEVTTGIINYVRSVNALQGAQLAEVLAK

SEQ ID NO: 1065 - protein, 275 aa, unidentified
  source 1..275: note = uncultivated organism;MG160-76 reverse transcriptase
MPLAFENFLYSYKKNGKPIYAPNPFGEKLGAELKRKVNKAYKFDSFVYHFKDGSHVLALHQHRNNQFFCRIDISKFFYSVQRNRVKRALKDIHVQRPEYYAKWSTVKNPYGAGYVLPYGFVQSPILATLVLAKSSIGIYLRGLPTSVTVSVYMDDICLSGNDEAELQTAFEGLIVAVAEAGFALNHDKTRPPAAQIDIFNCSLTNGKTEVLQDRIDEFFAEDRSAASEEGFKTYCNIVESMTWRTGHKKKRRRVYFRSLPKPAPVVAAAPVTQTI

SEQ ID NO: 1066 - protein, 245 aa, unidentified
  source 1..245: note = uncultivated organism;MG160-77 reverse transcriptase
MPVAIPNFDYSYLRKGKPVFVPTKTARRIGKEIKDAVEGAYAFDPIYFHLRRGGHIAAMHHHRDNHTFARVDISNFFYSISRRRVQSAMERVGMGNVGFYAKWSTVSNPYDDPKYALPYGFVQSPILASLVIATSKLGQHFLELPTSVKVAVYVDDISLSSNDPEALQQAYEATLAIIASDGFTINAGKLRPPAHAIDIFNCDLAHGRTTVADDRIAAFLSNNPSQEAEEAFIAYCASVEIGNQP

SEQ ID NO: 1067 - protein, 254 aa, unidentified
  source 1..254: note = uncultivated organism;MG160-78 reverse transcriptase
MPVQFQNFDYSYERDGKPVFAPSTLGRRIGEDIKAQVEAAYQFDPFVYHLRKNGGHVAALHAHRPHLYFARIDIKRFFYGIARNRVRRALSAIGLARGVHYAKWSCVKDPYGGARYVLPDGFVQSPILATLVLMESGIGALLRRLDAEGAVSVSVYMDDISLSSDDLGRLQTAFDALLESLAEAGFEVSPHKIRKPGPAIDVFNCDLEQGRTRVQPERIDRFEAESRSDASTDAFAHYCVSVEEGNAPTARSQS

SEQ ID NO: 1068 - protein, 264 aa, unidentified
  source 1..264: note = uncultivated organism;MG160-79 reverse transcriptase
MPLHTFSHRFQTSNGLQIYVPTSEGRELGARIAERVLRCWTPPAYFFHFRPGGHVAAARLHTMNSVFARLDIQTFFDSISRSKISRALRFLRIPREEAFELASLSTVSKEGGKRSLPFGFVQSPALSSLVLDRSALGRCLRDISLGKVALSVYMDDILVSGRDAAVVEAAVGELGSAAKQSGFILNAGKSQVGAPEITAFNLRLGHKMLEVLPERMTLFASTPRTTDGLKERAMVGYVATVNETQSSFLKGVLGLGEEQAGQPL

SEQ ID NO: 1069 - protein, 253 aa, unidentified
  source 1..253: note = uncultivated organism;MG160-80 reverse transcriptase
MPAKWLHRFERKPGRWVFEPSPEARAEGVEVKALVESRWKAPTYYFHLRRGGHVAALLRHQRSTFFVKVDIADFFGSVSRSRISRVLKEFFPHTDARRIATASTVQHPDDDARQILPYGFIQSPLLASLALHKSALGKYLDELHRERRFVVTVYVDDIIISGGDHVELCFALSELKTKAQRSRFVFSDEKEQGPAASISAFNIELATGSPLFILPPKLAEFRDAFRASPSELQRAGIQSYVRSVNHAQADTLP

SEQ ID NO: 1070 - protein, 254 aa, unidentified
  source 1..254: note = uncultivated organism;MG160-81 reverse transcriptase
MPSRDRWISKFQIKEGTWVFVPTKETIENGYKIKKKIENVWDSPDVFYHLKKGGHVRALQNHLNKKFFLHLDIKDFFGHINRSRVTRSLKDHLPYEEAREIAMESTVRSPESSSSKYILPFGFVQSPIIASVCLSKSAFFRELRSLCKDGFTLSVYMDDIILSHNYCDRLSEQMASLKEASERSGFPLNDKKQKGPDECITAFNVFLTQGELRIIPEKFDELRNAYRNSENKFQRDGIASYVYSINHSQAGLLF

SEQ ID NO: 1071 - protein, 255 aa, unidentified
  source 1..255: note = uncultivated organism;MG160-82 reverse transcriptase
MPFYDRWKSRFQIKEGTWVFVPTKETIENGYKIKKRIESVWDPPDIFYHLKKGGHVKALRNHLDKKYFLHLDIKDFFCCINRSRVTRSLKEYFSYQEARGIAIESTVRLPESSNSKYILPFGFVQSPIIASVCFSKSAFFRKLLSLYKDGFTLSVYMDDIILSHNNCDKLKDQMPSLKEASERSGFPLNDKKQQGPGECVTAFNVFLRQSELRIIPEKFDEFNTAYRNSESEFQRSGIASYVNSINSSQAAFLLD

SEQ ID NO: 1072 - protein, 254 aa, unidentified
  source 1..254: note = uncultivated organism;MG160-83 reverse transcriptase
MPSRDRWGSRFQIKEGTWVFVPTKETIGNGYKIKRKIENVWDCPEVFYHLKKGGHVKALQNHLNKKYFLHLDIKDFFGHINRSRVTRSLKDHLPYEEAREIAMESTVRSPESSSSKYILPFGFVQSPIIASVCLSKSAFFRELRSLCKDGFTLSVYMDDIILSHNYCDRLSEQMASLKEASERSGFPLNDKKQKGPDECITAFNVFLTQGELRIIPEKFDELRNAYRNSENKFQRDGIASYVYSINHSQAGLLF

SEQ ID NO: 1073 - protein, 277 aa, unidentified
  source 1..277: note = uncultivated organism;MG160-84 reverse transcriptase
MSRADRIISLLDNYPEDGKAFRSVELKSNGKLRLIAKPNKPLRKWLRSMNKELGSYFGDWPSFMHGGIKKRSYVTCARQHLNKNCVITLDIRDCFDTINEKQIATVLETNLKLEPELCSKLAHLVSFKGKLAQGFPTSNFICNLYLLDTLRKLNEDFKKQNLTLGNYVDDIVMSGKITQPDRVINQVATELSRIGLKMNKAKVKVMPSHKRQTVCKLLVNKRLSLTKELKRELYSQLARGEMNEASLSGWLANLKTIDPIFAEKLQNFALKKANLEY

SEQ ID NO: 1074 - protein, 253 aa, unidentified
  source 1..253: note = uncultivated organism;MG160-85 reverse transcriptase
MEKYSSRFELKPGRFVYIPTTECLEVGRQVVREVCDYWAPPPWFFHFAKGGHLAAVDNHSGHQVLSRQDFSNFYGAVTHSKLVRTLKRVGMPYSRANEIARLSTVRQDSGYALPYGFVQSPFLASLALDQSYIGRTIRDLPRLGISRSVYMDDMIVSHATEHGPVDEAIKLLKSSAQISSFPLNEEKSQGPANQIEVFNIDISAELLSIAPDRLLEFRSNIIEFGPGLASDAIIRYVDGINAGQADLLRDELG

SEQ ID NO: 1075 - protein, 257 aa, unidentified
  source 1..257: note = uncultivated organism;MG160-86 reverse transcriptase
MDRWINRFKLNHSIWVFVPSDDSRQVGRKIKTAIEKNYKFPEFYFHLKNGSHIKALNSHMQHEYFASLDIENFFGNINKSRITRVLKIFFSYDEAREYANWSVVRNPDENSNESILPFGFVQSPALASLCLDKSKLGRELRNINNLDVSVSVYMDDIILSSNDKALLYKSLKKVEEASEKAKFPLNKDKKNNPSNKVTVFNIDLSRGKLQINNKRIKEFQSAYEKTGLDEEKKGILNYIKTINPIQEKQFIDKINKI

SEQ ID NO: 1076 - protein, 142 aa, unidentified
  source 1..142: note = uncultivated organism;MG160-87 reverse transcriptase
MPFGFVQSPALASLCLDKSKLGRVLRNINNLDVSVSVYMDDIILSSNDKALLYKSLKKVEEASEKSKFPLNKDKKNNPSNKVTVFNIDLSRGKLQINNKRIKEFQSPYEKTGLDEEKKGILNYIKTINPIQEKQFIDKINKI

SEQ ID NO: 1077 - protein, 281 aa, unidentified
  source 1..281: note = uncultivated organism;MG160-88 reverse transcriptase
MEHLEQLKVEELASLLGLDSSALTELAQKAPRLYREKKLAKKSGAVRIIEAPHDVLKKTQRLLLNKVLVGLPVDRMLHGGKGSSTIKAVSPHVRKAVVMTLDIRDFFPSVTSRMVRTMLRKRGASEDVARLLTRIVTRKHHLPQGAPTSPCIARLVLHPVAGHVRRALQSVGTAASASIYVDDVTVSGPPGIDRLRNTIVNIIERHGFRVHPDKVKIMPTEEEQESLGIRLNNGIEPTPAFLTKLDETELALGSAHPRVRGMHGYARSLRRAQSVLSKEGG

SEQ ID NO: 1078 - protein, 261 aa, unidentified
  source 1..261: note = uncultivated organism;MG160-89 reverse transcriptase
MRNYSSRFRLPNGKWAYIQFKGLAGDANRHMRRIRGFWNPPDHFFHFQKGGHVAALRQHQGRAWYGKIDLSRFFNHVTRHRVTRCLKRLGYSFRDAEEFAVASTVCVDHKEWRFALPYGFVQSPLLASIAFDLSELGNCCRRLNSGNCAVSIYVDDIVISGDTKAEVEAALSEMHQAARMSNFAINTAKSRAASTALQAFNIDFDAHEMNISNERFDEMGRDVMFSGAGQVSDGILGYVRSVNPRQADQLLRNFPRAFARE

SEQ ID NO: 1079 - protein, 254 aa, unidentified
  source 1..254: note = uncultivated organism;MG160-90 reverse transcriptase
MAFHELWDQKFELSPGKWVFVPSVESRERGKYIVSEIKKKWEAPSYFYHCHRGGHVEAVKKHLTHTYLCCIDIENFFTSINRSRVTRTLKKYFGYKIAREFAKDSVIRLSIDSSSKCILPFGFLQSPIIASICLHESALGDALNKLALTPNLIVSVYVDDIIISCNDLHLLQKQFEYVITIAKKSGWKISDRKTIPPGNQISVFNIEMSCGDLSISSERMSLFYKAYHDAISEHQKEGILRYIRSINPEQVDFL

SEQ ID NO: 1080 - protein, 254 aa, unidentified
  source 1..254: note = uncultivated organism;MG160-91 reverse transcriptase
MAFHELWEERFELAPGKWVFVPSAESRERGEHIASKIKEKWQAPAYFHHCHQGGHVRAIKQHLANTHFCCVDIEGFFTSINLSRVTRALKQYFGYEVARKFARDSVIRLVGDVDSQYILPFGFVQSPIIASVCLDQSALGRVLHELTFKQDITVSVYVDDIILSCNDPCRLQHEFESIKAAADRSGWKVSTSKTQPPSEQIVSFNIHLSQGNLVISSERMGLFVDAYNQATSAHQKEGILRYIRSINPAQATFL

SEQ ID NO: 1081 - protein, 284 aa, unidentified
  source 1..284: note = uncultivated organism;MG160-92 reverse transcriptase
MGNNVTTEILATALGLATDQLLDLAARAPRMYRHKRKPKKSGRGMRTIDAPHPGLKKVQRKLLDHVLTMFPTHSTLFGVKGHTTTSAVRCHTKKAVVITMDISDFFPSIKDFMVRRALLSRGVPADAAKVMTRLMTCNNHLPQGAPTSTRMAMLVLEPAAAEIQRLIASIPKTDLSVWVDDATLSGPRGVTRLIPTIVRIFNRYKFTVHPDKLKVMFQSQEQVSLGIKLNNGIEISSSFMEKYKKEGLPLPEHNPRRKGMESHIRHINGQSPKRPARRNTAVMP

SEQ ID NO: 1082 - protein, 291 aa, unidentified
  source 1..291: note = uncultivated organism;MG160-93 reverse transcriptase
MSMGNILTTEILATALGLATDQLLDLAARAPRMYRHKRKPKKSGRGMCTIDAPLPDLKKVQRKLLDNVLAMFHTHPSLFGSKGHAIKSAVRCHTKKAVVITMDISDFFPSIKDFMVRRALLSRGVPADAAKVMTRLMTCNNHLPQGAPTSTRMAMLVLEPAAAEIERLIASIPKTDLSVWVDDATLSGPIGMTRLIPTIVRIFNRYKFTVHPDKLKVMFQSQEQVSLGIKLNNGIEISTSFMEKYKKEGLPLPENNPRRKGMESHIRHINGQSRQQPVRQEKAGDTENACE

SEQ ID NO: 1083 - protein, 256 aa, unidentified
  source 1..256: note = uncultivated organism;MG160-94 reverse transcriptase
MPKTLWINKFEIKPNKWVFVQSLEHKNRGAALVVSLAKRWSPPSFYYHLREGGHVAALKSHGQHQYFFYIDIKDFFGSINRTRVTRVLKKHMKYDVARSVANFSTVKIKINSEEKYVLPFGFTQSPFLSAMCLDDSQLGRLLREYSVLASSGSLNVSVYMDDIILSSNNLKYLTDAGQSILAAANRSGFDIKDIGSAGVKELVEVFNVQLSQGLLEITPERMHEFSMRYAASSNEHERLGIYNYVVSVNPAQAAFL

SEQ ID NO: 1084 - protein, 285 aa, unidentified
  source 1..285: note = uncultivated organism;MG160-95 reverse transcriptase
MSNFSSLEKNVGIYGFSKEELKKIKENFKNEYKIVDIPKPKGGYRTIFSPSIRLKSLLRILNEQLSTEASFPNGITAIQGRGLKYHLEPHIKKTLVMTTDIKDFFPSISIENLKLSLLKYTSLEEVLISEILEFSLVEDTIPQGFPTSSFFSNISILNLWERIQKLIKGMNIDISVYSDDWAISGDPDEVFLAFDILRKEIRREGFKLSNGKKKVMWKGQDQIVCNIKVNKGLEITEKYIEEVKEEVRLYRGGFPFGKIEDLKLLGKIEYIRGINRKQAKSLKVD

SEQ ID NO: 1085 - protein, 233 aa, unidentified
  source 1..233: note = uncultivated organism;MG160-96 reverse transcriptase
MIGLYLYLAIVAKKIGHEIKKLVDDAVDFDPFFFHLRQGGHVMALHAHRKHKYFARADISKFFYGVGRNRVTRALHEIGIPHAGTYAKWSCVKNPYGDPRYSLPYGFVQSPILATLVLMRSAVGEFLRNLSKTVTSSVYVDDISLSCDSKTEIDAAFNCLLEMIEASNFKIAKDKTQAPAEQITLFQCNLAYQQTAVRGERRSEFYAVERSVASASAFERYCDSVAERNAPTA

SEQ ID NO: 1086 - protein, 279 aa, unidentified
  source 1..279: note = uncultivated organism;MG160-97 reverse transcriptase
MGKTETLEKLLEEYPSDAGAFCTFEPKPDGASRPIVKPNKSLNKWLKQVKRALYQRRKDWPTFIHGGVKKRSYVSFARPHTNKKTVIAIDIHNCFGSITQQEVQNALVKKLGLPDGLASRLAAKLCYKRRVPQGFATSSYLTNLYLNDTLLTINRKLRRLQVDMTIYVDDIALSAQQMNSAEIINTVILELSRARLLVKKAKIKVMHSHRPQVICGLIVNKGVALTRQKKKQLFSDVANKRISEVSLQGWLANLNMIDKELMTKLEAYAIQKGVVKVGA

SEQ ID NO: 1087 - protein, 279 aa, unidentified
  source 1..279: note = uncultivated organism;MG160-98 reverse transcriptase
MGNTEELEKLLAEYPADAGVFCTTEPKRDGTSRPIVKPNKSLNKWLKSVKRALYRQRKDWPTFIHGGVKKRSYVSFARPHANKNTVIAIDIRDCFGSITQREVQQALIDKLSLSSGLASRLAAKLCYRHRIPQGFATSSYLTNLCLNDTLLQVNRLLRRERVDMTIYVDDIALSGQQVNAAEVINLVTVQLSRAGLAVSKAKIKVMHAHAPQIICGLVVNKGVALTRQKRKEIFSDVANGRMTETSLEGWLANLNMIDKQLMRKLQAYAIEKGVIRAGA

SEQ ID NO: 1088 - protein, 249 aa, unidentified
  source 1..249: note = uncultivated organism;MG160-99 reverse transcriptase
MPVQFENYTHSFELKGKPVFAPSERGRRIGNDIKLKVEAAANFDAFYHHLQPGGHVAALHAHRDNRYFARVDIERFFYGIGRNRVARAIRESGIRRAAHYAKWSCVKNPYGDPSYSLPYGFIQSPCLATLVLMLSPVGVFLRSLSRELTVSVYMDDISLSAADQARLMTAYEELTACMQHSGFALNAAKCRPPAVALDVFNCSLTGGLTQVLEDRVAKFFSVARTAPSEASFMRYCAAVEAGNAALPKS

SEQ ID NO: 1089 - protein, 178 aa, unidentified
  source 1..178: note = uncultivated organism;MG160-100 reverse transcriptase
MMKVSQRWSSKFQIKPGSWVFVPTDEAVKYGNFIKASIEAIWSPPNYYYHLRDGGHVKALSSHLEHQFYIHLDISNFFGCINKTRTTRSLKRYWSYDAAREMASQSTVRDPNSPKNARYILPFGFVQSPIIASLCLRNSKLGSYLAKINKMAEITVSVYMDDIIISSNDAQQLAVILA

SEQ ID NO: 1090 - protein, 270 aa, unidentified
  source 1..270: note = uncultivated organism;MG160-101 reverse transcriptase
MHNYVHRIPLGEDKWAYEQKPSLIEPANIWMDEIRKRWQPPNYFFHLRSGGHVAAARSHLKNCYFAKTDLRRFFEQVTKNRIIRRLSGLGFQPDDAIDFAVASTIRIRTDQQDRFALPYGFVQSPLLASLDTDKSELGRTFSNLDKSGHTISVYVDDIVISGPTKEQVEEGLALIHNAASVSNYEINEAKSTNTLPSMVAFNIAFGHGYMHVTEDRMTEFEQAILTTYDEDAKIAVLAYIKSINHAQAVDLFNKFESHLECARHIVIGMR

SEQ ID NO: 1091 - protein, 245 aa, unidentified
  source 1..245: note = uncultivated organism;MG160-102 reverse transcriptase
MSVAIPNFDYSYLRKGKPVFVPTKVGRRIGQEIKEVVEDAYVFDPIYFHLRRGGHVAAMHYHRDNHFFARIDISNFFYSISRRRVQSALDRARVANARFYAKWSTVVSPFGDPRYALPYGFVQSPILASLVVATSDLGRHLLNLPASIKVGVYVDDISLSSDDEAELHQAYDDILAVIALDRLAVNLAKLRPPANIIDIFNCDLAHVIASVTDERVNAFQSSNPSLEAESAFIAYCASVEMGNQP

SEQ ID NO: 1092 - protein, 375 aa, unidentified
  source 1..375: note = uncultivated organism;MG160-103 reverse transcriptase
MAVQFGNYTHSFEMKGKPVFAPSERGRRIGNDIKQQVEAAATFDDFFHHLQPGGHVSALHAHRENRYFARVDIKRFFYSIGRNRVARALRELGIERATHYAKWSCVKNPYDDPSYALPYGFVQSPILATLVLALSPVGAFLRALSRELTVSVYMDDISLSSADKERLQFRFEELCSLMQRSGFALNAAKRRAPAQALDVFNCNLIGGRTQVLESRVANFFRLRAQNQAKLASCGIALLLRPATQNRWHHSRFANDATAIRNRWRVSQTDLIWSACSIVRKPARISSTTTSCVRRIVNTCPVIPASRSAWRIARPSSIAKACRRLMATAMAEHSPGPRRGVADRRPNSATSTGSFTASSVTQSAVIASAYRSTCAG

SEQ ID NO: 1093 - protein, 375 aa, unidentified
  source 1..375: note = uncultivated organism;MG160-104 reverse transcriptase
MAVQFGNYTHSFEMKGKPVFAPSERGRRIGNDIKQQVEAAATFDDFFHHLQPGGHVSALHAHRENRYFARVDIKRFFYSIGRNRGARALRELGIERATHYAKWSCVKNPYDDPSYALPYGFVQSPILATLVLALSPVGAFLRALSRELTVSVYMDDISLSSADKERLQFRFEELCSLMQRSGFALNAAKRRAPAQALDVFNCNLIGGRTQVLESRVANFFRLRAQNQAKLASCGIALLLRPATQNRWHHSRFANDATAIRNRWRVSQTDLIWSAGSIVRKPARISSTTTSCVRRIVNTCPVIPASRSAWRIARPSSIAKACRRLMATAMAEHSPGPRRGVADRRPNSATSTGSFTASSVTQSAVIASAYRSTCAG

SEQ ID NO: 1094 - protein, 375 aa, unidentified
  source 1..375: note = uncultivated organism;MG160-105 reverse transcriptase
MAVQFENYTHSFELKGKPVFAPSERGRRIGNDIKQQVEAAATFDDFFHHLQPGGHVSALHAHRENRYFARVDIKRFFYSIGRNRVARALRELGIERATHYAKWSCVKNPYDDPSYALPYGFVQSPILATLVLALSPVGAFLRALSRELTVSVYMDDISLSSADKERLQFRFEELCSLMQRSGFALNAAKRRAPAQALDVFNCNLIGGRTQVLESRVANFFRLRAQNQAKLASCGIALLLRPATQNRWHHSRFANDATAIRNRWRVSQTDLIWSACSIVRKPARISSTTTSCVRRIVNTCPVIPASRSAWRIARPSSIAKACRRLMATAMAEHSPGPRRGVADRRPNSATSTGSFTASSVTQSAVIASAYRSTCAG

SEQ ID NO: 1095 - protein, 189 aa, unidentified
  source 1..189: note = uncultivated organism;MG160-106 reverse transcriptase
MDIANFFGRINRTRVTRVLKSLFGYTTAREYAKVSVVRDPSHSHMPPKYMLPFGFTQSPLLASLCLDASSVGDLLKKIDVMPELRLSVYVDDIIISSNDIEKLKEVFDRLKTAVNRSGWALSTTKTQPPNVAITAFNICTSYGNLTITEGRMEEFAEEYVNATSDYVKEGIVSYVTSVNPAQARKFDGL

SEQ ID NO: 1096 - protein, 254 aa, unidentified
  source 1..254: note = uncultivated organism;MG160-107 reverse transcriptase
MAFHELWEDRFELAPGKWVFVPSSESRQRGEHIVSRIKEKWQAPAYFYHCHHGGHVRAVKKHLANTYFFRVDIESFFTSINLSRVTRVLKKYFGYEVAREFARDSVVRVAGDVDFQYILPFGFVQSPIIASLCLDQSALGRALYELASRPDITVSVYVDDIIISGNSLHSLQKEFEIIKENTGKSGWNLGASKTQTPSDRILAFNINLSQGSIAISPERMSSFFEAYHQSASPHQKEGILRYIRSINPAQAAAL

SEQ ID NO: 1097 - protein, 252 aa, unidentified
  source 1..252: note = uncultivated organism;MG160-108 reverse transcriptase
MPAKWEHRFERKPGRWVFVPTDEARVAGEHIRAVVAGLWRAPTYYYHLRAGGHVAALREHQASSFFFKVDISDFFGSVSRSRLSRVLKVYFSHQKALHVATESTVRDPANPGKAMLPYGFVQSPLLASLALHSSRLGALLDRLSKEEGLVVTVYVDDIVVSGHDVERLRDVLDEVKVVAGRSRFELSDEKQQGPASAIEVFNIKLSAHAELALTDGRLAEFGEALRAATSAYQVAGIGSYVQSINTAQAAAL

SEQ ID NO: 1098 - protein, 252 aa, unidentified
  source 1..252: note = uncultivated organism;MG160-109 reverse transcriptase
MTPSDQWVYRFRKKSGWVFVPTEDTIAYGQEVKALIEERWRTPSYYYHLQQGGHISALCQHKPHKYFLHLDIKHFFGNIRASRVTRCLKEIVSYAEAREIAIYSTVHHPYAKRLSILPFGFIQSPIIASVCLKMSALGKVLHELHKKSCMTVSVYMDDIIISSDNIDDLENTLAKIEQASDRSRLPLNKTKQEGPGKMVTAFNIELSQHNLDITPGRLSEFQKIYHASTNESQKAGILNYVKAINNAQAKAF

SEQ ID NO: 1099 - protein, 255 aa, unidentified
  source 1..255: note = uncultivated organism;MG160-110 reverse transcriptase
MQSKWINRFELKPGRWVFEPSAESKALGQEIKASVERAWRSPKFYFHLRSGGHVEAVRSHLENTHFLHIDIQDFFGSVNRTRITRCLKSRVGGYAIAREWANASTVRSPVDEKRHMLPYGFVQSPILASLALDESRLGKRLRTIAESPRTAVSVYVDDIIVSTQEAAPLASHFAVIKQDAALSGFTLNEVKAAGPALTITAFNIVIAHASIAIEGARLDEMVQAYSQSESSQQKAGIFGYVRSVNTEQAEAFTGS

SEQ ID NO: 1100 - protein, 258 aa, unidentified
  source 1..258: note = uncultivated organism;MG160-111 reverse transcriptase
MHIHERWIHKFQIKENSWVYVPTEAAKEFGETVKETIESKWKAPKIYYHLSSGGHVKALNQHIQNNYFLHLDIKDFFGNITRNRVTRCLRRFYPTHADARDVATESTVHLPNSDPVKHILPFGFVQSPILASICLKQSALGKLLEQISKESDFELSVYMDDIIVSSNNLDSLKTVFPRIEAASIRSKLPLNADKQEGPGEIVTAFNVRLTHNLLELTDERMKQFEEVYNNSTNEAQKNGILSYLASINLTQHDILHNT

SEQ ID NO: 1101 - protein, 249 aa, unidentified
  source 1..249: note = uncultivated organism;MG160-112 reverse transcriptase
MAVQFENYTHSFELKGKPVFAPSERGRRIGNDIKQKVEAAAIFDDFFHHLQPGGHVSALHAHRENRYFARVDIERFFYGIGRNRVARALRELGIERATHYAKWSCVKNPYDDPSYALPYGFVQSPILATLVLALSPVGAFLRALSRELTVSVYMDDISLSSADKERLQFRFEELCSLMQRSGFALNAAKRRAPAQALDVFNCNLTGGRTQVLESRVAEFFSFARTEPSEASFLRYCAAVEAGNAEPLSL

SEQ ID NO: 1102 - protein, 246 aa, unidentified
  source 1..246: note = uncultivated organism;MG160-113 reverse transcriptase
MLTNYKFKYRTRGRHIFVPTEQCERKGRRIIKFFARFEFPEYFYHYKSGGHVAAMHTHLANKLFFKIDIQNFYYSINRMRVTRALRSYAYPGANTLATWSCVKNPYPGTTNHVLPIGFVQSPLLASLVLMKSQVDTAIARAMENGVCISVYMDDFIGSHDDPDVLEAAYTNIRTASVAAGLIPNPDKLVPPTEAITAFNCDLTFGSANVTAERVAKYEAKETRTPLSDASFAQYRHLVASANKSAP

SEQ ID NO: 1103 - protein, 244 aa, unidentified
  source 1..244: note = uncultivated organism;MG160-114 reverse transcriptase
MIKNYKFKYESRGKFLYVPTERCDQKAERLASFFERKAVFPSYFYHYRSGGHIAAIHEHIKNDFFFRIDVKNFFYSIRRNRVARVLNAYGFGPARAFAKWSCVLNPYPEGGFVLPIGFRQSPLLASLVLARSPVVQAISRAMTRGVFVSVYFDDFIGSALDADALRTAYDDILAACDQAQLYPNEAKLHETATAIQAFNCDVKKGSARVSQLRREKFEGSSPTPSARVSFDYYCKLVERENRAH

SEQ ID NO: 1104 - protein, 281 aa, unidentified
  source 1..281: note = uncultivated organism;MG160-115 reverse transcriptase
MNKTAETLEKLLASYPVDANMFRTSQEKSDGGRRPIVKPNKSLRKWLKQMLRELRSVRNDWPTFIHGGIRKRSYVSFARPHTNKKTVVTLDIRDCFGSISQKQVAESLVTKLVLQKNLAQQIAKKLCVDGKIPQGFATSNFLTNLYLNDTLLVIRRKLSKKHVEMTIYVDDIALSGNNFDSSEIINTVCIELSHAKLAIKKAKVRVMHSNRRQIIVGLVVNKGVAIAKEKRTELFSLVSKKTISDTSLNGWLANLNMINKPLKKKLAAFANKNGYDIDAKK

SEQ ID NO: 1105 - protein, 243 aa, unidentified
  source 1..243: note = uncultivated organism;MG160-116 reverse transcriptase
MIVNYEFKYRSRGKWFFVPNDKCERRGQRMLAYFKRRVTFPDYMYHFKKGGHVAALHAHLSNNLFFKIDIQNFYYSIARMRVTRALRQWGYPGANTFAMWSCVRNPLPGPAHALPIGFVQSPLLASLALMKSEVADAIDRAIAKGVCISVYLDDFIGSHNDLAVLTAAYEDIRDTCVAAGFIPNPGKLVPPQAAITAFNCDLTNGTAEVTAARVAKYFARTDRTPLSDSGFDEYRDLVRSQNV

SEQ ID NO: 1106 - protein, 243 aa, unidentified
  source 1..243: note = uncultivated organism;MG160-117 reverse transcriptase
MIVNYEFKYRSRGKWFFVPNDKCERRGRRMLAYFKRRVAFPDYMYHFKKGGHVAALHTHLNNHFFFKIDIQNFYYSIARMRVTRALRQWSYPGANTFAMWSCVRNPLPGPKHALPIGFVQSPLLASLALMKSEVAEAIDRARAKGVCISVYLDDLIGSHDDEALLAEAYEDIRATCVAAGFIPNPGKLVPPQAAITAFNCDLTNGTAEVTAARVAKYLGRIDRTALSDLGFEEYRGLVRSQNF

SEQ ID NO: 1107 - protein, 250 aa, unidentified
  source 1..250: note = uncultivated organism;MG160-118 reverse transcriptase
MPIKWSSKFELRPGKWVFVPTPESIDTGREIKRALEKCWIPPPYYFHLRAGGHVEALRSHLKHSQFLRIDIQDFFGSINRTRVTRSLKKKFPYKIAREYANASTVPDPSAKRIILPFGFVQSQIVAAVCLAESALGIYLDKLKNNSNVELTVYVDDIIVSSSDNALLDQVLQDIKAAAEKARFILNPIKQEGPASIITAFNVTLMSGNMEVDPVRLKLFQEALAEATSKHQIAGIRAYVMSVNTIQGLRL

SEQ ID NO: 1108 - protein, 244 aa, unidentified
  source 1..244: note = uncultivated organism;MG160-119 reverse transcriptase
MIVNYEFKYRSRGKWFFVPNEKSERRGRRMLAYFKRRVVFPDYMYHFKKGGHVAALHAHIHNRFFFKIDIQNFYYSIARMRVTRALRQWGYPGANTFAMWSCVRNPLPGPKHALPIGFVQSPLLASLALMKSQVADAIERAMAKGVCISVYLDDFIGSHDDEALLTAAYEDIRNTCVAAGFMPNPSKLISPQATITAFNCDLTNGSAEVTAARVAKYLGRTDRTPLSDAGFDEYRHLVRSQNTP

SEQ ID NO: 1109 - protein, 276 aa, unidentified
  source 1..276: note = uncultivated organism;MG160-120 reverse transcriptase
MIAADRITYLLDHYPPNARVYKSRLPKPGGGFRPITKPNKELKKWLRDMNRALRVQYNNWPKFMHGGIKKRSYISYARLHVNKPCVITIDIKRCFDSITTDEVAEALQRYLQLPEGGCKQLAQRLCFLGHIPQGFPTSNYLCNAYLCEPLSALQKSLATQGIMLTNYVDDLAASGRISAPDEVVNEIALTLSHAQLAVSKAKVRIMPSSRRQLICGLIVNKRLSLTRSLKLKLLRDIATGQMSEDTAMGWISHLKMINPTFQQKLRAYAFKKGVLK

SEQ ID NO: 1110 - protein, 252 aa, unidentified
  source 1..252: note = uncultivated organism;MG160-121 reverse transcriptase
MDKWQHKFEIKKGQWVYVPTKSMLQFGKKLHQKIRAKWTPPLYFYHMRDGGHVASARKHINSQYFALIDIKSFFESTSQSRVTRELKNIFKYKDAREIAKLSTVKNPMVHGTKYVIPYGYPQSPILATLCLHKSYCGNLLRSINKSGNVLISVYMDDIIISGNDLNLLTTTYSLLRDALEKSGYLMNEVKSQSPTKTLKVFNLELSHQSLRVSPKRIVEFLIAYAKSTSFYEREGIAAYVGSVNNKQANLFP

SEQ ID NO: 1111 - protein, 272 aa, unidentified
  source 1..272: note = uncultivated organism;MG160-122 reverse transcriptase
MIGTIQNLDAKALSFCLECNYSDLLHLADNAPGQYHEIKIEKRGKSRIIEIPTPYLKKKQKMLLTKVFYPLKTHPRLYGGPGSSIKKAATDHVRKPIVITIDIKNFFPNVNTIKIREMLHRRKASKDVAELLIRLTTYKNHLPHGSPTSPCIGRLILNPFAINLEKMLRRIHPKAFFSIYVDDIIISGPLGIKRAIRPIYQIIKRYGFEPNERKTKVMDYKNEQASLSIRLNRRIEPTTAYLKEVEALENILSSTDPKLIGKKAHIQFLFKD

SEQ ID NO: 1112 - protein, 271 aa, unidentified
  source 1..271: note = uncultivated organism;MG160-123 reverse transcriptase
MQTDLSYLTRDNLSKSLSITSDKLINFTKSPKKFYYKKSKRKKNGGTRILEIPIHSLKLVQKYLLKKILYKLPISPMLFGGPGSSTKKAVISHTQKATVTAMDINNFYPSIKSYHIRNVFLQHKATKEIAEILTRLVTYKNHLPQGAPTSTYVGLLVLQSAAQQIEKMLKKIPRSSFSIYVDDIIISGPEGIKRFVPIIRKILKRYRFEINDKTNIMNRDKEQVCLNIGLNNGIEPPKSYLQELKELARKVPASDPRLRHKKAYIDFLLNN

SEQ ID NO: 1113 - protein, 271 aa, unidentified
  source 1..271: note = uncultivated organism;MG160-124 reverse transcriptase
MAQILENLSVDSLAVKLGLSKTALIDLVKDVPRLYYEISIPKKDGSERKLEIPLPIFKKLQKRLLDRILHKIPTHPKLYGRPGTSTKKAVKEHVKKEAVITMDITNFFLSTKSACVKNMLIENGSRDDVAKLLTRLVTHKKHLPQGSPTSPCIARLMLQGFAEGLEKFLKQIPYSAFSIYVDDITISGPKGIKHAKSIVKKILKRYGYDINESKTKIMNQTEEQISLNIRLNERIEATTQFLKEIEELEKEVPPYDTQLLGKKSYIKYLMK

SEQ ID NO: 1114 - protein, 273 aa, unidentified
  source 1..273: note = uncultivated organism;MG160-125 reverse transcriptase
MKTLDNFSIEKLSKATGLPRDALLDLTKDVPFLYHESYIPKKKQGHRKLEIPHPVLKKFQKVLLKKVLNKIPTHPCLYGRPGDSVKKAVREHVKKKVIITMDIEDFFPSTKAFMIRNAFIRNGTTKEVAKLLTRLVSRNYHLPQGAPTSPCIGRIILHPFAQEVEKIFINIPMSSFSIYFDDITISGPKDIKGFRNTIGEMLKRYGYMVNKNKTKVMDRNQDQISLGIRLNDRIEARKEFMREIEELEKKVPPSDLKLRGKKSYVEFLRRPDE

SEQ ID NO: 1115 - protein, 249 aa, unidentified
  source 1..249: note = uncultivated organism;MG160-126 reverse transcriptase
MLHLADNAPRQYHEIKIEKGEKTRIIEIPTPYLKKKQKMLLTKVFYPLKTHPCLYGGPGSSIKKAATDHVRKPIVITIDIKNFFPNVNTIKIREMLHRRKASKDVAELLIRLTTYKNHLPHGSPTSPCIGRLILNPFAMNLEKMLRRIHPKAFFFIYVDDIIISGPLGIKRAIQPIYQIIKRYGFEPNERKTKVMDYKNEQVSLSIRLNRRIEPTTAYLKEVEALENILSSTDPKLIGKKAHIQFLFKD

SEQ ID NO: 1116 - protein, 274 aa, unidentified
  source 1..274: note = uncultivated organism;MG160-127 reverse transcriptase
MFKTLEKLNIDNLSKILNLSRYEFLRFVKIAPNQYHEVTIRKNDKTRIIEIPNPTLKKVQKLLLEKVLYGLHTHPRLYGYPGSSIKKAVSSHVQKPIVITIDIKDFFPSVKSSQIEKMFRRRKANERIARILITLTTYKKHLPHGSPTSPCIGRLILNPFALNLEKMFNRIHPNAFFSIYVDDITISGPEGLKNSIPTIYKMINRFEFEANKDKTNIMERDKEQISLNIRLNKRIEPTTKFLKEVEELKESLPSLHPTLIGKKAFIKFLFRNEN

SEQ ID NO: 1117 - protein, 274 aa, unidentified
  source 1..274: note = uncultivated organism;MG160-128 reverse transcriptase
MTQILESLSVEILAEKIGLPSNALLELSTDAPLLYFKKLIPKNGSSTRKLEIPYLILKNFQKKLLKKILHKIPSHHKLYGSPGTSIKKAVAEHVRKATVITMDIKDFFPSIKVFKVKNTFIRNGATIGVAEILSRLVTHKNHLPQGAPTSPCIGRLVLQQFADEFEKLLEKIPKSSFSIYVDDITISGPEKIKGIQNTVGKMLNRHGFEINKNKTKIMNRDEEQVSLNIKLNKRIEATERYLKEIEELEKRVPSSDPVLRGKKSYVKYLMRPDY

SEQ ID NO: 1118 - protein, 271 aa, unidentified
  source 1..271: note = uncultivated organism;MG160-129 reverse transcriptase
MQTDLSYLTCDNLSKSLSITSDKLINFTKSPKKFYYKKSKRKKNGGTRILEIPIHSLKLVQKYLLKKILYKLPISPMLFGGPGSSTKKAVISHTQKATVTAMDINNFYPSIKSYHIRNVFLQHKATKEIAEILTRLVTYKNHLPQGAPTSTYVGLLVLQSAAQQIEKMLKKIPRSSFSIYVDDIIISGPEGIKRFVPIIRKILKRYRFEINDKTNIMNRDREQVCLNIGLNNGIEPPKSYLQELKELARKVPASDPRLRRKKAYIDFLLNN

SEQ ID NO: 1119 - protein, 209 aa, unidentified
  source 1..209: note = uncultivated organism;MG160-130 reverse transcriptase
MAAARLHESSAAIVRLDIDRFFDHVTRTKIARALRAIGFPADEAFEAARLSTVRKPGHAGYSAPFGFVQSPLLASLVLDRSALGRSLRRIKSAGALLSVYVDDILLSSDSAATTQAFLAEVQVAANASGLPLNLAKSQLQPGPAAEAFNLHIGNGMLRVNGLRMTKFSSDAYYASAEQLEGYAYYLNSVNHNQAIKFLDDLEQAGLRLP

SEQ ID NO: 1120 - protein, 251 aa, unidentified
  source 1..251: note = uncultivated organism;MG160-131 reverse transcriptase
MTHKWTHRYELKPGRWVFAPTEEAKKTGARIKREVAAHWKPPTFYFHLRSGGHVAAVHTHVASQYFFRADLEDFFGRVNRSRVTRCLKSWFSYADAREMASESVVRRPGHNGFVLPYGFVQSPILASLALDKSKLGSYLRALNGRPNLRVSVYVDDIIVSSTDESCLGDAVAKLKQLADLASFPINASKTEGPGHGVTAFNIELSHAALQITDARLAELKADYDAAASGYSKAGILSYVRSVNEAQSAVFK

SEQ ID NO: 1121 - protein, 272 aa, unidentified
  source 1..272: note = uncultivated organism;MG160-132 reverse transcriptase
MRPLSYEYSFDIKPGKPVFIQTAESKARGAEIIKLISEAYSPHEIFHHFKRRRGHVGALNKHQQSEWFSRLDLADFFGSVTRTKLSRALRGLGFTDRDAFKMAFDSVVVRGNRKVLPFGFCQSPLLATLALESSALGQKLIEVSNRGIITTVYMDDALLSSDDSASLAGATDEVIAAAAIAEFALAPDKVTINQPVAEIFNCNITRGRRVFTPARMEQFVADLMEANPAGAEAIERYVSTISEAELEHLRARLNPPVQGVRWFADAASGEAS

SEQ ID NO: 1122 - protein, 244 aa, unidentified
  source 1..244: note = uncultivated organism;MG160-133 reverse transcriptase
MAVAIPNFRFSYRRKGKPVFVPTTIGERIGREVKKAVEAAYDFDPMFFHLKSGGHVAAMHEHRPNTLFARIDISRFFYSISRRRVQSALDRIGVGNVIFYAKWSTVRNPYGAPRYALPYGFVQSPILASLVVARSALGEHLLALPDSVRATIYMDDITLSSCDQGELQRAFEATLGVLEEDGFQISADKLRPPSPEIDVFNCDLSEGRTAVRDDRIAAFFSKGAGPESEEAFIAYCATVEVGNK

SEQ ID NO: 1123 - protein, 247 aa, unidentified
  source 1..247: note = uncultivated organism;MG160-134 reverse transcriptase
MPVAIPNFDYSYLRKGKPVFVPTKIGRRIGNEVKKAVEDAYSFDPIYFHLRRGGHVAAMHHHRDNHFFARIDISNFFYSISRRRVQSALDRIGVGNARFYAQWSTVVSPYADPRYALPYGFVQSPILASLVVATSDLGGQLLGLPASIKVGVYVDDISLSSDDEAGLQQAYNTILGAIASDGLAVSPAKLRPPAGMIDIFNCDLAHGMGRVSGTTGSMPSSLAIPHRTQKMPSSPTALRSRWGTNLR

SEQ ID NO: 1124 - protein, 256 aa, unidentified
  source 1..256: note = uncultivated organism;MG160-135 reverse transcriptase
MRNLFDHHFTLKPGTRVYIPTDEGRDRGREITRRVEKAWKAPPNFFHLREGGHVAAARRHKDHPWVASLDLQRFYDQILRSRVHRSLKRIGFDHDDAFEMACDSVVDKKPPQREFSLPFGFVQSPLLASVVFHHSALGHAIRQLKRDGLTVTVYVDDVTLSGETEQAVLSGVQELETAAADSNFAFNEAKKQGPCDEVTAFNIRFGSGTFEIEEARMDAFKRAIEVGSDWSIDGILGYVGAVNQDQFEALVAGTGN

SEQ ID NO: 1125 - protein, 265 aa, unidentified
  source 1..265: note = uncultivated organism;MG160-136 reverse transcriptase
MTLPWKDRFQVKPGRWVYIPTPETLEQGRQIKALVTENFQAPPFYYHLHEGGHVAAIQSHTDDRYFLNVDIENFFGAINRSRVTRSLKKRFPYPLAREITVQSTVRVTNEGRYEYHLPYGYPQSTILASICLFDSALGKYLLSLSAQHNVSIYVDDIIISGNDHAELNRISDTLVEKSVASRLPFGRKKVTQVADRITAFNIVLSHQYMQITDQRYNQLLQQALLTDNENVIEGILSYVLSVNPRQHNNMRQELFTLSNTTKTPV

SEQ ID NO: 1126 - protein, 212 aa, unidentified
  source 1..212: note = uncultivated organism;MG160-137 reverse transcriptase
MAAIQSHTDDRYFLNVDIENFFGAINRSRVTRSLKKRFPYPLAREITVQSTVRVTNEGRYEYHLPYGYPQSTILASICLFDSALGKYLLSLSAQHNVSIYVDDIIISGNDHAELNRISDTLVEKSVASRLPFGRKKVTQVADRITAFNIVLSHQYMQITDQRYNQLLQQALLTDNENVIEGILSYVLSVNPRQHNNMRQELFTLSNTTKTPV

SEQ ID NO: 1127 - protein, 229 aa, unidentified
  source 1..229: note = uncultivated organism;MG160-138 reverse transcriptase
MLFGTALKASIESRWKPPSFYYHLRDGGHVKALQSHISHKFFLHLDISNFFGCINRSRVTRCLKGMYSYRNSRDIALRSTVIHPDLVLNKYILPFGFVQSPIIASLCLAKSRLGRFLAASNRKDSYSVSVYMDDIIVSADDKKELQQLLGEIVPISEKSRFFLNKKKQEGPSKEITAFNIKLTNSVLSVTRERLEEFKKAYKETESLHVLQGIVGYVETVNKEQASELI

SEQ ID NO: 1128 - protein, 237 aa, unidentified
  source 1..237: note = uncultivated organism;MG160-139 reverse transcriptase
MFHNVDYRFNGPAGKLVHVPSEKGKYVGSQVRELLADYRWDRFYRHLGRGGHIDILHRHRPNAWFATADVENFFPSVRRNMVAAALRRAGVRESQHFAKWSTVRAPEGGYVLPFGFPASPLLATLVIQESPLGSFLRAAAQAVTVQVYLDDISLSSGEEELLGDVHEGLLLAMAASGFAPSARKTFPPARRVELFNCVLEQGMAAVSAERRAAYDVTGISAERFKTYCRAVERGNWR

SEQ ID NO: 1129 - protein, 272 aa, unidentified
  source 1..272: note = uncultivated organism;MG160-140 reverse transcriptase
MLGTYDHKFVLPNGSQVFVPSALGRQVGATMHAAVRRRWRPPRYFYHLRTGGHVGALREHLYNRCFATLDISRFFDSVTRAKIHRALRSIGIAHEQAWEITQQSTVEKTLRQRDFSLPYGFIQSPVLASLALDRSALGRAMKAIARSNHTRLNCYVDDVILSGIEEEAVEDSRLALVAAAQRSGFILNATKSQRPSSTITAFNIVLSNGGLAVTEERMRAFEDAILSSGPVSVAAIIAYVRPINRAQADDLVKVACTSPDMEVRELAASFAT

SEQ ID NO: 1130 - protein, 271 aa, unidentified
  source 1..271: note = uncultivated organism;MG160-141 reverse transcriptase
MLGTYDHKFVLPKGSQVFVPSALGRQAGAAVHAEVRRRWRPPHYFYHLRPGGHVAALRGHLHNRCFATLDIGHFFDSITRAKIHRALRSIGIGHDRAWEIAQESTVEKTLRQRDFSLPYGFIQSPVLASLALDRSAFGRAMKTIARSNHTRLNCYVDDIILSDIEEQAVEDSRLALVAAARRSGFVLNETKSQRPHSAITAFNVMLSNGELAVTEKRMHAFVAAIRSSGPAAAAAIIAYVRSINHAQAEELIEVARTSPDGEVRDLAAAYC

SEQ ID NO: 1131 - protein, 271 aa, unidentified
  source 1..271: note = uncultivated organism;MG160-142 reverse transcriptase
MLGTYDHKFVLPKGSQVFVPSALGRQAGAAVHAEVRRRWRPPHYFYHLRPGGHVAALRGHLHNRCFATLDIGHFFDSITPAKIHRALRSIGIGHDRAWEIAQESTVEKTLRQRDFSLPYGFIQSPVLASLALDRSAFGRAMKTIARSNHTRLNCYVDDIILSDIEEQAVEDSRLALVAAARRSGFVLNETKSQRPHSAITAFNVMLSNGELAVTEKRMHAFVAAIRSSGPAAAAAIIAYVRSINHAQAEELIEVARTSPDGEVRDLAAAYC

SEQ ID NO: 1132 - protein, 249 aa, unidentified
  source 1..249: note = uncultivated organism;MG160-143 reverse transcriptase
MSAPLIENYRFKYKSRGKWIYVPNDRCLQRPKQIIKFFKRDISFPAYFYHYKPGGHVAALHDHLKNDFFSKIDIQNFFYSIARNRVARAFASKGLRGAPTYAKWSTVRSPYENGPRYVLPIGFWQSPHIASLVLMQSPVANAIERARDKGVLVSVYLDDFVGSHGDDALLRDVYGDIQAACVEANLAPNENKLVAPNKAIVAFNCNLTKGLAKVTDERIAKFFSVGRSDIGRQSFEDYLERVERANARA

SEQ ID NO: 1133 - protein, 244 aa, unidentified
  source 1..244: note = uncultivated organism;MG160-144 reverse transcriptase
MFQNYKWTWKRNGKIIFAPTQDTDRRGDQIIEFCDREVEFPLCFYHYRKGGHVVALHGHLQNRLFFKIDIQNFFYSISRNRIGAALHHAGFPWARTFAKWSSVKNPYLVGSRYVLPIGFKQSPALASLAMMRSPLMTMVDRAERAGAFVSIYLDDLICSANDEALLQELYEGFLQACEDANLTPNPTKLVPPTSEIVVFNCELRHGFAQVTPERIAKYFEEPRTAASQRSFDVYCAKVSEANTV

SEQ ID NO: 1134 - protein, 271 aa, unidentified
  source 1..271: note = uncultivated organism;MG160-145 reverse transcriptase
MLETYDHKFVLPKGSQVFVRSALGRQAGAAVHAEVRRRWRPPHYFYHLRPGGHVAALRGHLHNRCFATLDIGHFFDSITRAKIHRALRSIGIGHDRAWEIAQQSTVEKTLRQRDFSLPYGFIQSPVLASLALDRSAFGRAMKTIARSNHTRLNCYVDDIILSGIEEQAVEESLLALVAAARRSGFVLNEPKSQRPDSAITAFNVVLSNGELAVTEERMHMFEAAILSSGPASAAAIIAYVRSINHAQAEELVDMARTSPDGEVQDFGGCYG

SEQ ID NO: 1135 - protein, 271 aa, unidentified
  source 1..271: note = uncultivated organism;MG160-146 reverse transcriptase
MFGTYVHKFVIPKGSQVFVPSALGRQVGEAVHAEVRRRWRPPHYFYHLRPGGHVAALRAHLHNRCFATLDISHFFNSITRAKIHRALCSIGIGHDRAWEIAQESTVEKTLRQRDFSLPYGFIQSPVLASLALDRSALGRVMKTITRSNHTRLNCYVDDVILSGIEEEAVEDSRLALVAAAWRSGFVLNESKSQRPSSAITAFNIVLSNGGLAVAEERMRAFEDAILLSGPASVGAIIAYVRSINRAQAEALVEVAVTSPDGDVRELAATVW

SEQ ID NO: 1136 - protein, 247 aa, unidentified
  source 1..247: note = uncultivated organism;MG160-147 reverse transcriptase
MAVQFRNYAYSYEIGNGKPVFAPSERGRKIGLKIKQLVEAKFDPDPFFFHLRRGGHLAALHAHRRHRYFARLDIENFFYGIGRNRVTRALHEIGVDQPRTFGKWSCVRNPYGEPSYALPYGFIQSPLLATLVLARSGVGPVLRELSKRLTVSVYVDDVALSGNNRRVLRRAYRKLTKAVQDAGFTINVDKSAAPGTMIDLFNCHLRHMRTIVTEARRAEFYSRPKGHQSAQGFETYCTSVRRGNANA

SEQ ID NO: 1137 - protein, 334 aa, unidentified
  source 1..334: note = uncultivated organism;MG160-148 reverse transcriptase
MRDGKFRPALTKLPSQAKEMVPCARARLGAFLVASRPYLPNGVGAGFTSPQLSSSFESMRNVARSFVKDGTRYYVLTKSYAGWRTFSEGSDAAMAGEEEWRLLKERVLSHWQPKAVFTAFSKRAHIAALRPHLENKCFATIDLKGFFDCVTRTKVCRALESIGFARSAAFKVAGESTIRQGDKYTLPRGFRQSSLLATLVLEKSLFGSALVGNRFESRITVYSDDIIFSSNDPEVLADEHSQAIELLRRSNFPINATKTQTVRTEVSIFNLRMSHRTLRFTDERMWKFLEQAARFVKGEDAEHDLHLYEKLFGDYIRSINPEQEKRLRTSLGLP

SEQ ID NO: 1138 - protein, 271 aa, unidentified
  source 1..271: note = uncultivated organism;MG160-149 reverse transcriptase
MLETYDHKFVLPKGSQVFVPSALGRQAGAAVHAEVRRRWRPPHYFYHLRPGGHVAALRGHLHNRCFATLDIGHFFDSITRARIHRALRSIGIGHGRAWEIAQESTVEKTLRQRDFSLPYGFIQSPVLASLALDRSAFGRVMKTVARSNHTRLNCYVDDIILSGIEEQAVKESRLTLVAAARRSGFGLNKDKSQRPDSAITAFNVVLSNGELAVTEERMHAFEAPIRSSGPASAAAIIAYVRSINHAQAEELIEVARTSPDEPSATCVLSGR

SEQ ID NO: 1139 - protein, 244 aa, unidentified
  source 1..244: note = uncultivated organism;MG160-150 reverse transcriptase
MIVNYDFKYRSRGKWFFVPNEKCERRGRRMLAFFKKRVAFPDYMYHFKKGGHVAALHAHLNNKLFFKIDIQNFYYSIARMRVTRALRYWRYPGAGAFSMWSCVKNPLPGPPHALPIGFVQSPLLASLVLMKSEVADAIDRAIAKGVCISVYLDDFIGSHDDPAVLTEAYEDIRVTCVTAGLIPNPRKLVAPSVAITAFNCDLKQGSALVTPARVAEYLARPDRTALSDAGFVQYAGLVSSQNVP

SEQ ID NO: 1140 - protein, 244 aa, unidentified
  source 1..244: note = uncultivated organism;MG160-151 reverse transcriptase
MLENYKDKYTSRGKFIFIPTPECDRRAERLLRFAEDIELPPYFFHYRRGGHVEALHQHIKNRYFFRIDLKNFFYSISRNRVNRILRQSGFHSAREWSEWSTVRNPYNDGPKYVLPIGFKQSPLLASLALWRSAVASSIEEAADRGVFVSVYFDDLIGSSNDEDELRTTYAGILAACEQANLVANEAKLIEPANAIIAFNCHLTHGQANVTEERIQKFIDEARGPNAETSFIDYCIRVQRLNHAA

SEQ ID NO: 1141 - protein, 163 aa, unidentified
  source 1..163: note = uncultivated organism;MG160-152 reverse transcriptase
MLPCNEHLNNALFFKIDIQNFYYSIARMRVTRALRDWRYPGAGTFAKWSCVVNPGSGPKFSLPIGFVQSPLLASLVLMKSPVNDAIERARANGVYISVYLDDFIGSHNDLAVLTAAYEDIRDTCVAASFIPNPGKLVPPRTAITAFNCDLTNGSALVTADRIN

SEQ ID NO: 1142 - protein, 244 aa, unidentified
  source 1..244: note = uncultivated organism;MG160-153 reverse transcriptase
MIENYKFKYRSRGKWFFVPNDKCERRGRRMLQFFKKRVVYPNYMYHFKKGGHVAALHAHLNNTLFFKIDIQNFYYSIARMRVTRALREWHYPGAGTFSIWSCVRNPGPGPKHALPIGFVQSPLLASLVLMKSPVHDAIERARANGVCISVYLDDFIGSHNDLAVLTGAYEDIRDTCVAAGLIPNPGKLVAPQAAITAFNCDLTNGSALVMADRINKYLASPNRTVMSDAGFAHYQTMVASKNVP

SEQ ID NO: 1143 - protein, 245 aa, unidentified
  source 1..245: note = uncultivated organism;MG160-154 reverse transcriptase
MAVAFENYLYSNPTEKGKPYFVPTDRCRRIGAETMTLVRARVKFEHHYYHFSKGAHVAALHAHRAHRYFARLDIQNFFYSVGRNRVKSALKDIGVPYAEHFAKWSTVRNPYDDPRYALPYGFVQSPLLASLVLRQSAIGTAIRDLPVRIKRSVYLDDIALSANKRDDLEEAFETVIAAVEAANFTLNEAKVIGPSTDITLFNCDLSSGMTKVSDPRIAKFYDAPASEESVAGFEAYLASVEAGNR

SEQ ID NO: 1144 - protein, 246 aa, unidentified
  source 1..246: note = uncultivated organism;MG160-155 reverse transcriptase
MYQAAKIENYDYKYRSRGKWIFVPNERCKRKGERILSYFSRVKFPSYFYHYQPGGHVAALHAHLQNSLFFKIDIQNFYYSIARMRVTRVLRNRGFVGAHTAARWSCVANPLAGPRHVLPIGFLQSPLLASLVLLKSPVADAIERALDDGVCISVYLDDFIGSHNDNSVLTAAYDNIRHACVGAGLIPNAGKLVPPNAAITVFNCDLVHGAAQVTEARVNEFMEKPRNDISTAAFQAYRQRVASQNL

SEQ ID NO: 1145 - protein, 244 aa, unidentified
  source 1..244: note = uncultivated organism;MG160-156 reverse transcriptase
MFVNYEFKYRSRGKWFFVPNDKCERRGERMLAYFKRRVAFPDYLYHFKKGGHVAALHTHLNNHFFFKIDIQNFYYSIARMRVTRALRQWGYPGANTFAMWSCVRNPLPGPKHALPIGFVQSPLLASLVLMKSDVAEAIDRARAKGVCISVYLDDFIGSHDDEALLTAAYEDIRATCVAAGFIPNSGKLVPPQAAITAFNCDLTNGSAEVTAVRIAKYFGRTDRTPLSDAGFDEYRDLVKSRNTP

SEQ ID NO: 1146 - protein, 219 aa, unidentified
  source 1..219: note = uncultivated organism;MG160-157 reverse transcriptase
MHLANQIFATLDICGFFDSVTRSKIHRALRRIGVQQEPAREIAQRSTVEKTDGRRNFSLPYGFVQSPILASPALDKSGLGRVMKAVARSNHTKLTSYVDDIILSGIEEDAVEASRLALIAAAQNSGFAINIDKSQRCASEVTAFNIRLSNGSMAITERRMQEFETALERSDPRKAVGIVSYVRSVNHSQAEELAKQIMAFPEGEVRDAVLELAANWPMN

SEQ ID NO: 1147 - protein, 245 aa, unidentified
  source 1..245: note = uncultivated organism;MG160-158 reverse transcriptase
MITNYQFKYRSRGKYFFVPNEKCERRGRRMLAFFKKRVRFPDYMFHFRKGGHVAAMHAHLHNRLFFKIDIQNFYYSIARMRVTRALRHWGYPGANTFAMWSCVLNPGPGPRHALPIGFVQSPLLASLVLMQSDVAQAIERAIAEGVCISVYLDDFIGSHDDEAVLTQAYEDIRDTCVAAGLIPNPNKLVAPTEAITAFNCDLTNGSASVTVARQQKYLTSPDRTPMSDAGFSEYVALVESQNTVP

SEQ ID NO: 1148 - protein, 264 aa, unidentified
  source 1..264: note = uncultivated organism;MG160-159 reverse transcriptase
MQHTFSHKFETATGVLVHVPTKYGLTRGYEIVDAVLARWRPPAYFYHFRPGGHVAACRHHLTNPCFARLDIKSFFGSVTRTKVHRALRRIGVSQDDAFAFASTSTVLREGERGRYALPFGFVQSMVLASVALDRSLVGQRLLAAHRPHIKVSVYVDDIILSARQMAPLLEYVNVLVATANAAGFQFNPSKTLEPSIFTEAFNINVSQGTMCVTSERLAVFEREMHGQNRSRIDAVIAYVGTVNKAQAAQLSQCLEGRERQTAAP

SEQ ID NO: 1149 - protein, 273 aa, unidentified
  source 1..273: note = uncultivated organism;MG160-160 reverse transcriptase
MRGTYDHKFVLPKGQQVFVPSAPGRQAGALVHDEVRRRWRTRTPPYFYHLRSGGHVAALKAHVHNRCFATLDIHHFFDSVTRAKVHRALRSIGVGHSRAWEIVQESTVEKHRKHHDFSLPYGFVQSPILASLALDRSALGRAMKTVARSNHTRLSCYVDDVVLSGIEEEAIESSRLALIEAAQTSGFALNDDKSQRPGREVTAFNIVLSNGALAVTQRRMQEFEDDILASGALVVAGIIGYVYSVNRAQAAELVSIAQTSPDEAVRDAADKYS

SEQ ID NO: 1150 - protein, 244 aa, unidentified
  source 1..244: note = uncultivated organism;MG160-161 reverse transcriptase
MLENFRHKYLSRGKFIFVPTPECDRRAERLLRFAEGIELPPYFFHYRRGGHVEALHQHLANRYFFRVDLKNFFYSISRNRVNRILRQSGFRSAREWSEWSTVRNPYNDGPKYVLPIGFKQSPLLASLALWRSAVASSIEEAGDRGVFVSVYFDDLIGSSNDESELRITYEGILAACAQSNLVANEAKLIEPANAIVAFNCHLAHGQANVTEERIQKFIDEARGPHAETSFIDYCIRVQRFNHAA

SEQ ID NO: 1151 - protein, 253 aa, unidentified
  source 1..253: note = uncultivated organism;MG160-162 reverse transcriptase
MLYNFEYSFPIEGKRRVFVPTLESRAFGETLCRRVLRRWTPPDYFFHFQRGGHVAATRVHLGSHLFVRLDLRRFYDSVTRTKVHRALCLCRFRHHFAWDAACQSTVRKSGRGAPFSLPFGFVQSPVLASLALGVSSLGTALAQTHHGGLALSVYMDDILISGHDAKALSAARSRLETAAAQSGFEFHPLKSFGPASALEVFNLALGHESLEVTASRLADFKTAILEGDPATVAGILGYVGTVNRAQRGLLAGL

SEQ ID NO: 1152 - protein, 246 aa, unidentified
  source 1..246: note = uncultivated organism;MG160-163 reverse transcriptase
MAVPLHNYEFSYRNSKGKPVFVPTKKTRSIAREIYREVGLRFEAKDHFYHLRKGAHIAALHAHRAQTYFARIDLKNFFYSVGRNRVKAALKAVGVPSPERYARWSCVRNPYRRPSYALPYGFPQSPLLATLVLQSSALGAAIEAMPPEIFRSVYLDDVAISANDLGALEFAFQRLLGAVEHGNFVLNEGKVVGPAKQIEIFNCELARGHAEVTEKRVSEFYATPRSAESVAGFETYRASVAVGSAI

SEQ ID NO: 1153 - protein, 244 aa, unidentified
  source 1..244: note = uncultivated organism;MG160-164 reverse transcriptase
MLQNFKWTWKRKGKFIFAPSKDADRRGDQIIEFCARNVDFPLCFYHYRKGGHVLALHGHLQNQFFFKIDIQNFFYSISRNRIAAALHKAGFPWARTFAKWSSVRSPYDVGPRYCLPIGFKQSPALASLVLMRSPLMAMVERAEEAGAFVSIYLDDLICSGNDEAVLHELYEEFLAAFEEANLVPNPTKLVSLTDEIIVFNCELRHGFARVTQERIQEYLEVPRTAASQISFATYCAKVAEANIV

SEQ ID NO: 1154 - protein, 272 aa, unidentified
  source 1..272: note = uncultivated organism;MG160-165 reverse transcriptase
MIEPHGITVESLAENLELSTAECYKLSRAAHRLYRTSLHPKPSGGTRVIEAPFPRLKAVQRALSEKILNKIPVHSCFHGRPGTSQLSAARIHVRQPMLITMDVKDFFPSVTARMVGSALLKLDFQLPVIEEMVRLCTRKRRLPQGALTSPVLARIVLSPILLEIEVLFANISPHCKVTQFVDDLAFSGPSGIQRLIPTIHRLWTRHGFEVHPKKTKVMRADESQEVLGVWVNNGLAPTAEFLQRVEEARRTLPLDDQKRLGLENWLSEIQRK

SEQ ID NO: 1155 - protein, 255 aa, unidentified
  source 1..255: note = uncultivated organism;MG160-166 reverse transcriptase
MQKFYDHFFESRLKPGQLIFVQTEAEAKIGRGLIESVRRRWFIPPYFYHLKAGGHIAALQIHKSDRYFARQDLTSFFGSVSRNKVCQTLKKIGFSFFDANAIAHRSCVMLDGKRTLPYGYVQSPVLASVVLDKSALGQELKRLHASEVNVSVFMDDITLSHATSLDPLHAAVAALSKSAEASRFVISKDKAQGPSELVTAFNIDVQSEALTITRSRYEELAERISAQGKCPSTDGILGYVRQINPHQFSQLRDLA

SEQ ID NO: 1156 - protein, 244 aa, unidentified
  source 1..244: note = uncultivated organism;MG160-167 reverse transcriptase
MFQNFKWTWKRNGKTIFAPTKDTDWRGDKIIEFCDREVEFPVCFYHYRKGGHVVALHGHLQNRLFFKIDIQNFFYSISRNRVAAALHHAGFPWARTFAKWSAVKNPYPVGSRYVLPIGFKQSPALASLVMMRSPLMAMVDRAEGAGAFVSIYLDDLICSANDEALLQELYEGFLKACEDANLTPNPTKLVAPTSEIVVFNCELRHGFAQVTPERIAKYFEEPRTAASQRSFDVYCAKVSEANTV

SEQ ID NO: 1157 - protein, 204 aa, unidentified
  source 1..204: note = uncultivated organism;MG160-168 reverse transcriptase
MPSKWSNRFEIKAGRWVYVPTSEARREGIEIKRCIAARWHPPEYYYHLRKGGHVAAIQSHLGNSHFIRFDIQDSFGSINRTRVTRCLKPLVPYSEARAWANSSTVRDPVFKGKTHLPYGFVQSQMLASICLYRSALGTYLHRIHGKNGVVVCVYVDDVIVSACDVDELKVIYSQIQVASARSRLKLSQDKAPRPLRRCPPLTSF

SEQ ID NO: 1158 - protein, 312 aa, unidentified
  source 1..312: note = uncultivated organism;MG160-169 reverse transcriptase
MSWQYCSSKDFPKIFTEKNFFFLLDIKKAEFLQIAAEKITHYRKWKKVKSDGVKYREIYNPDRKLKYLLKKLSKRYLSKFNYPPFAHCGPKGRSIITACRGHERFIHHVSLDIESFFDRVSKLVVERTLLAVGVNKTIEKLIVDISVEDNRLPQGFPTSSLLSALVVSLALRDFYTEFESKELQLSLYADDILISSNNKQLLLDAERYIAEKLEAIKLSLNPDKKTEGTGTKFLWLSLRIHPKIALPRKNLRDLQKSVYAHKTTGAIPKGFKPKKRGDLKKQWKLSVKGKIDFAQSVNKNKLLEKISRDSQQ

SEQ ID NO: 1159 - protein, 254 aa, unidentified
  source 1..254: note = uncultivated organism;MG160-170 reverse transcriptase
MSRRWKHKFELKPGCWVFVPEEEAIQQGRKIKQEIESAWRRPEYYFHLTAGGHVAALKSHLNSDVFIRADIHQFFNQINRSRVARNLKNIFRSYKKAINYADDSVVRLPNCKAKKYILPFGFVQSAIIASLCFRFSALGIFLEHLRKSGFVVSVYMDDIIISSRCPIDEMEDVYRNLTTIAIKSGFALNLEKMNGPSTDITAFNIELSNGKLAITKKRLSAFESILAESKNPYQIDGILGYIKTVCPAQAFCFE

SEQ ID NO: 1160 - protein, 283 aa, unidentified
  source 1..283: note = uncultivated organism;MG160-171 reverse transcriptase
MTPTEQIVELLSKYPSEGKAVRIFQNKPDGGRRPITKPNKSLNKWLKHMNKILSKQFNGWPLFMHGGIKKRSYVSYAKPHVMQQCLITIDIRKCFDSISTNDIASSLEEHLKLPRDVCIDLASKLCYRCKLAQGFATSNYISNLYLLNPLTLLFNDLQKEGIVFTNYVDDLAISGDLERTDEIINLVAVSLSRAKLAINKAKIKVMPSTGQQIICGLIVNRRLSLTRALKLKLLSDVANNRISQSSAEGWISNLNSFDKKFRDKFYKFAIKKGLIKTKARKYK

SEQ ID NO: 1161 - protein, 245 aa, unidentified
  source 1..245: note = uncultivated organism;MG160-172 reverse transcriptase
MPVSFENYTHSFLLNRKHIFAPSERGRRIGEDVKQRVESAVSFEDYYYHLRKGGHVAALHSHRANAHFCKIDIKNFFYSVERNRVVRALRRIDVHRATHYGKWSCVRNPFGDPKYALPYGFVQSPILATLVLATSEIGRTLRLMASDVTVAVYVDDISLSSSDPVRLKARYDELLDAVDAAGFTVNAEKCVAPCSDMTVFNCSLRSGETVVTSDRAAEFHMFPPSPESLAGFERYCASVERGNTK

SEQ ID NO: 1162 - protein, 245 aa, unidentified
  source 1..245: note = uncultivated organism;MG160-173 reverse transcriptase
MPVSFENYTHSFLLNRKHIFAPSERGRRIGEDVKQRVESAVSFEDYYYHLRKGGHVAALHSHRANAHFCKIDIKNFFYSVERNRVVRALRRIDVHRATHYGKWSCVRNPFGDPKYALPYGFVQSPILATLVLATSEIGRTLRLMASDVTVAVYVDDISLSSSDPVRLKARYDELLDAVDAAGFTVNAGKCVAPCSDMTVFNCSLRSGETVVTSDRAAEFHMFPSSPESLAGFERYCASVERGNTK

SEQ ID NO: 1163 - protein, 245 aa, unidentified
  source 1..245: note = uncultivated organism;MG160-174 reverse transcriptase
MPVSFENYTHSFLLNRKHIFAPSERGRRIGEDVKQRVESAVSFEDYYYHLRKGGHVAALHSHRANAHFCKIDIQNFFYSVARNRVVRALRHIDVHRATHYGKWSCVRNPFGDPKYALPYGFVQSPILATLVLATSEIGRTLRLMASDVTVAVYVDDISLSSSDPVRLKARYDELLDAVDAAGFTVNAGKCVAPCSDMTVFNCSLRSGETVVTSDRAAEFHMFPPSPESLAGFERYCASVERGNTK

SEQ ID NO: 1164 - protein, 245 aa, unidentified
  source 1..245: note = uncultivated organism;MG160-175 reverse transcriptase
MPVSFENYTHSFLLNRKHIFAPSERGRRIGEDVKQRVESAVSFEDYYYHLRKGGHVAALHSHRANAHFCKIDIKNFFYSVERNRVVRALRRIDVHRATHYGKWSCVRNPFGDPKYALPYGFVQSPILATLVLATSEIGRTLRLMASDVTVAVYVDDISLSSSDPVRLKARYDELLDAVDAAGFTVNAGKCVAPCSDMTVFNCSLRSGETVVTSDRAAEFHMFPPSPESLAGFERYCASVERGNTK

SEQ ID NO: 1165 - protein, 245 aa, unidentified
  source 1..245: note = uncultivated organism;MG160-176 reverse transcriptase
MPVSFENYTHSFLLNRKHIFAPSERGRRIGEDVKQRVESAVSFEDYYYHLRKGGHVAALHSHRANAHFCKIDIKNFFYSVERNRVVRALRRIDVHRATHYGKWSCVRNPFGDPKYALPYGFVQSPILATLVLATSEIGRTLRLMASDVTVAVYVDDISLSSSDPVRLNARYDELLDAVDAAGFTVNAGKCVAPCSDMTVFNCSLRSGETVVTSDRAAEFHMFPPSPESLAGFERYCASVERGNTK

SEQ ID NO: 1166 - protein, 253 aa, unidentified
  source 1..253: note = uncultivated organism;MG160-177 reverse transcriptase
MHPKWSSKFELKPGKWIFVPTAETVIEGRKIKLAIKKKWKPPSYYFHLKAGGHVEALRTHMEHDNFLRIDIRDFFGSINRTRVTRCLKDKFGYGIARSYANASTVPDPVVPKRFIIPFGFVQSQIIAAVCLEESALGIYLNNLSSNPAIALTVYVDDIIVSTSDKVLLDQVLTDIEVAAKRANFTLNADKQEGPAAAITAFNIVLAKDSMVVDASRMKKFEEAFATATSESQRAGIKSYVTSVNASQALATFP

SEQ ID NO: 1167 - protein, 245 aa, unidentified
  source 1..245: note = uncultivated organism;MG160-178 reverse transcriptase
MPVSFENYTHSFLLNRKHIFAPSERGRRIGEDVKQRVESAVSFEDYYYHLRKGGHVAALHSHRANAHFCKIDIQNFFYSVARNRVVRALRHIDVHRATHYGKWSCVRNPFGDPKYALPYGFVQSPILATLVLATSEIGRTLRLMASDVTVAVYVDDISLSSSDPVRLKARYDELLDAVDAAGFTVNAGKCVAPCSDMTVFNCSLRSGETVVTSDRAAEFHMFPSSPESLAGFERYCASVERGNTK

SEQ ID NO: 1168 - protein, 252 aa, unidentified
  source 1..252: note = uncultivated organism;MG160-179 reverse transcriptase
MTPSDQWLYKFKRKSGWVFVPTPDTLAYGKEIKVLIEKRWKAPAYYYHLRQGGHVAALQQHSSNEYFLHLDIKSFFGHINATRITRCLKGMFSYVKAREIAIHSTVHHPKAKHLSILPFGFVQSPIIASVCLRMSTLGNCLHELHKQAGMEVSVYMDDIILSSNNLDDLKKALEKVEQASERSILPLNKKKQEGPDRMVTAFNIKLSRNNLDITAERLGEFQSIYHASPNPNQKAGILHYVKTVNASQAAMF

SEQ ID NO: 1169 - protein, 245 aa, unidentified
  source 1..245: note = uncultivated organism;MG160-180 reverse transcriptase
MPVSFENYTHSFLLNRKHIFAPSERGRRIGEDVKQRVESAVSFEDYYYHLRKGGHVAALHSHRANAHFCKIDIQNFFYSVARNRVVRALRHIDVHRATQYGKWSCVRNPFGDPKYALPYGFVQSPILATLVLATSEIGRTLRLMASDVTVAVYVDDISLSSSDPVRLKARYDELLDAVDAAGFTVNAGKCVAPCSDMTVFNCSLRSGETVVTSDRAAEFHMFPPSPESLAGFERYCASVERGNTK

SEQ ID NO: 1170 - protein, 245 aa, unidentified
  source 1..245: note = uncultivated organism;MG160-181 reverse transcriptase
MPVSFENYTHSFLLNRKHIFAPSERGRRIGEDVKQRVESAVSFEDYYYHLRKGGHVAALHSHRANAHFCKIDIKNFFYSVARNRVVRALRHIDVHRATHYGKWSCVRNPFGDPKYALPYGFVQSPILATLVLATSEIGRTLRLMASDVTVAVYVDDISLSSSDPVRLKARYDELLDAVDAAGFTVNAGKCVAPCSDMTVFNCSLRSGETVVTSDRAAEFHMFPPSPESLAGFERYCASVERGNTK

SEQ ID NO: 1171 - protein, 268 aa, unidentified
  source 1..268: note = uncultivated organism;MG160-182 reverse transcriptase
MTLPWKDRFQVKPGRWVYIPTQDTLEQGQQIKALVAEKFTAPSFYYHLQEGGHVAAIQSHVDDQYFLNVDIENFFGVINRSRITRSLKKRFPYGQAREITVQSTVRVTNEGRYEYHLPYGYPQSTILASICLFDSALGRYLHFLSAHHNVSVYVDDIIISGNDLKELQQVSDTLVEKSVASRLPFGRKKAPQVSEKITAFNIELSQHTTKLTNKRYVELRQQALLTDNENVISGILGYVSSVNRSQHYTMRKEIFTLNHKAKTPVETD

SEQ ID NO: 1172 - protein, 292 aa, unidentified
  source 1..292: note = uncultivated organism;MG160-183 reverse transcriptase
MFLSIIGRHIQEIMEKIELLEKLLSEYPADAAVFCASEPKSDGTFRPIVKPNKPLSDWLKRVKRALYQQRKDWPTFIHGGVKKRSYISFARPHTNKNTVITVDIRDCFGSISQNNVQIALIEKLGLPNGLACRLATKLCHKRRIPQGFATSSYLTNLYLNDTLLIIKRQMSRMGVDMTIYVDDIALSSQHIDSAKVINIVSQELSRAELAISKAKVKVMHSHGPQIICGLIVNKRISLTRQKKKELFSDIANGRMSEASLSGWLANLNMIDKELMRKLHTYAIKNGNMKLGA

SEQ ID NO: 1173 - protein, 274 aa, unidentified
  source 1..274: note = uncultivated organism;MG160-184 reverse transcriptase
MLEKLLSEYPADAAVFCASEPKSDGTFRPIVKPNKPLSDWLKRVKRALYQQRKDWPTFIHGGVKKRSYISFARPHTNKNTVITVDIRDCFGSISQNNVQIALIEKLGLPNGLACRLATKLCHKRRIPQGFATSSYLTNLYLNDTLLIIKRQMSRMGVDMTIYVDDIALSSQHIDSAKVINIVSQELSRAELAISKAKVKVMHSHGPQIICGLIVNKRISLTRQKKKELFSDIANGRMSEASLSGWLANLNMIDKELMRKLHTYAIKNGNMKLGA

SEQ ID NO: 1174 - protein, 267 aa, unidentified
  source 1..267: note = uncultivated organism;MG160-185 reverse transcriptase
MNTEITEERLAKSLNLSLNELREWISCAHKSYGRMVIIKPNGKRRIIYPPTKQLKFIQRKLLRNILSKIPTPQEMCSGKGKSTKDIMQKHVNKNMLIRIDLSDFFPNIKAHRIFTLLRERGFSQRVARIITKLTTFRGSLPQGSPCSPQLACLALAPAAKHIINLFQFPVSITFYVDDIIISGSSSIQNFRETIYDILERNGFVVNRAKTKIMPKGTEQSALGLRVDHGKVEPDSQFMEKYQKARHENANSESIRGMRKYLKYIISK

SEQ ID NO: 1175 - protein, 335 aa, unidentified
  source 1..335: note = uncultivated organism;MG160-186 reverse transcriptase
MRFISQTFRRIKMNHRYCRIIFAGYYTVKFLNELIDLLVKILTLFNYFLPKKQMSFPLWSHRYKSKKGKWIYIPTDECRIKGANIIRLLSTFWHSPSYFYHLQKGSHIAALKLHLYNGSDLRQIKNSRYFSYFDITNFFGSINKNKIIKATKCFVGYQMAKDIANASTVTNIGSSEKVLPFGFVQSPLIGSIVLDQSYLGRELSKLSKLHNLKLSVFVDDIIISSDNKKLIQSASERILKAIEKSNLHLNQEKSSICNGSMKVFNIFAKYNCLYLTEHRLTVFAEKLINNSSDYFVVEGIVNYMKMVSPHQSKRLIKEIVCEIGTSRAGFIAKIP

SEQ ID NO: 1176 - protein, 181 aa, unidentified
  source 1..181: note = uncultivated organism;MG160-187 reverse transcriptase
MRRHVNKNMLIRIDLSDFFPNVKAHKIFTLLRERGFSLEVARIITKLTTFRGGLPQGAPCSPQLACLALAPAAKHIINLFKFPVSISFYVDDIIISGSGSIQNFRETIYAILERNGFIVNREKTKIMPKKAEQAALGLRVDHGVVEPDSQFMNKYRNARNGGAKPESIRGMKKYIEYINSK

SEQ ID NO: 1177 - protein, 282 aa, unidentified
  source 1..282: note = uncultivated organism;MG160-188 reverse transcriptase
MSFPLWSHRYKSKKGKWIYIPTDECRIKGANIIRLLSTFWHSPSYFYHLQKGSHIAALKLHLYNGSDLRQIENSRYFSYFDITNFFGSINKNKIIKATKCFVGYQMAKDIANASTVTNIGSSEKVLPFGFVQSPLIGSIVLDQSYLGRELSKLSKLHNLKLSVFVDDIIISSDNKKLIQSASERILKAIEKSNLHLNQEKSSICNGSMKVFNIFAKYNCLYLTEHRLTVFAEKLINNSSNYFVVEGIVNYMKMVSPHQSKRLIKEIVCEIGTSRAGFIAKIP

SEQ ID NO: 1178 - protein, 282 aa, unidentified
  source 1..282: note = uncultivated organism;MG160-189 reverse transcriptase
MSFPLWSHRYKSKKGKWIYIPTDECRIKGANIIRLLSTFWHSPSYFYHLQKGSHIAALKLHLYNGSDLRQIKNSRYFSYFDITNFFGSINKNKIIKATKCFVGYQMAKDIANASTVTNIGSSEKVLPFGFVQSPLIGSIVLDQSYLGRELSKLSKLHNLKLSVFVDDIIISSDNKKLIQSASERILKAIEKSNLHLNQEKSSICNGSMKVFNIFAKYNCLYLTEYRLTVFAEKLINNSSDYFVVEGIVNYMKMVSPHQSKRLIKEIVCEIGTSRAGFIAKIP

SEQ ID NO: 1179 - protein, 282 aa, unidentified
  source 1..282: note = uncultivated organism;MG160-190 reverse transcriptase
MAPQEYTLCQLANNLGFTTVQTLQAFAKKAPSCYGRVVIPKDKQNPTKGLREINPPTEELKQIQRLLLEKVLYHINTLDNMGAGRGSSTAKIMALHTKKDMMLCYDISNFFPSVKKWTIKRCLRDRGFPWDVIDVIANLTTFNNHLPQGGPCSTQLGKIIISPPAKHLLRLLKNYGTAVDVSFWVDDIIISGPRSLKNLEKSDNVYNIFSRYGFQLKREKTKIQPKTDEQNALGLRVDRGIVESDSEFICSYSTEISLNGCNSKRAKGMRNYMKSVRKKIMR

SEQ ID NO: 1180 - protein, 282 aa, unidentified
  source 1..282: note = uncultivated organism;MG160-191 reverse transcriptase
MSFPLWSHRYKSKKGKWIYIPTDECRIKGANIIRLLSTFWHSPSYFYHLQKGSHIAAIKLHLYNGSDLRQIKNSRYFSYFDITNFFGSINKNKIIKATKCFVGYQMAKDIANASTVTNIGSSEKVLPFGFVQSPLIGSIVLDQSYLGRELSKLSKLHNLKLSVFVDDIIISSDNKKLIQSASERILKAIEKSNLHLNQEKSSICNGSMKVFNIFAKYNCLYLTEHRLTVFAEKLINNSSDYFVVEGIVNYMKMVSPHQSKRLIKEIVCEIGTSRAGFIAKIP

SEQ ID NO: 1181 - protein, 279 aa, unidentified
  source 1..279: note = uncultivated organism;MG160-192 reverse transcriptase
MGKIELLEKLLSEYPADAAVFCASEPKSDGTFRPIVKPNKPLSDWLKRVKSALYQQRKDWPTFIHGGVKKRSYISFARSHTNKNTVITVDIRDCFGSISQNNVQTALVEKLGLPNGLAHRLAAKLCYKRRIPQGFATSSYLTNLCLNDTLLIIKRQMSRISVDMTIYVDDIALSSQYIDSAKVINLVSKELSRAGLAISKAKVKVMHSYGPQIICGLVVNKRISLARQKKKELFSDIANGRMGEASLRGWLANLNMVDKELMEKMKNYAIKKGLLQTST

SEQ ID NO: 1182 - protein, 244 aa, unidentified
  source 1..244: note = uncultivated organism;MG160-193 reverse transcriptase
MPVKFENYTHSFRLNGKPVFAPSDLGRRIGEDLKQRVENAFVFPDYFFHLRKGGHVAALHSHRENTHFCKVDIENFFYSVARNRVVRALRATGVPRAAHYGKWSCVQNPYGHPSYALPYGFVQSPILATLVLATSEVGRALRRMSKDTTIAVYVDDISLSSNDHTQLAARYDELLEAIGLAGFTANKGKCVAPCSDLTVFNCSLQKGETAVTPDRVAEFHTTLPSPASLAGFEHYCQSVERGNS

SEQ ID NO: 1183 - protein, 266 aa, unidentified
  source 1..266: note = uncultivated organism;MG160-194 reverse transcriptase
MSVRFQNFTYTHSRAGKPIYVPNEKGRRLGEEIKRSVEKNVDFDDFYHHLRRGGHVRSLHLHKRNTYFARIDIERFFYSIGRNRVVRSIREAGISSPSKYGRWSCVRNPYKDPTYSLPYGFVQSPILASLVLLKSSAGKGLREMNRSITVSVYMDDISISSDSLSDLEAAYADLKGVIVESGFAINESKARAPSPTMDVFNCDLSQGEAVVQKARIDEFYSVARSEESKAGFERYRASVERGNGLTVSPLELDDDLEALIRFVLSA

SEQ ID NO: 1184 - protein, 260 aa, unidentified
  source 1..260: note = uncultivated organism;MG160-195 reverse transcriptase
MDLGLRNYEYSYRNAKGKPVFAPSVKGREIGQKVKKLVTEAVDFDGIYYHLRSGGHVSALHVHRENEWFSRIDLKNYFYSISRNRINRELRRIGIRHHERFAKWSTVKNPYKLPSYSLPYGFVQSPILATLAFQNSAVGTLLRDMASEIAVSVYLDDIGLSSSNLALLQKVHRATLEAVEESNFVVNLDKTAEPASEMVLFNCDLAHASANVRAERIDEFFSIERSEPSASAFLAYCEAVSAGNLTPGVDAAGVDRGHSG

SEQ ID NO: 1185 - protein, 245 aa, unidentified
  source 1..245: note = uncultivated organism;MG160-196 reverse transcriptase
MIVNYEFRYPSRGKWFFVPNEKCERRGRRMLQYFKKRVVFPDYMYHFKKGGHVAALHAHLNNQLFFKIDIQNFYYSIARMRVTRALRHWGYPGAGTFSMWSCVRNPLPGPKHTLPIGFVQSPLLASLVLMKSEVADAIKRATANGVCISVYLDDFIGSHNDQAVLTTAYEDIRDTCVAAGLIPNPGKLVPPQAAITAFNCDLRSGSAEVTAERVAKYFARTDRTHLSDSGFDHYRDLVRAQNTAP

SEQ ID NO: 1186 - protein, 272 aa, unidentified
  source 1..272: note = uncultivated organism;MG160-197 reverse transcriptase
MRHNYEYSFEIKPGKPVYIQRKDALERGLALTAEVEEQYQPNPLFYHFKRRGGHVAAMRVHTANSHFSRFDLEDFFAHVTRTKIVRALLNLGWAPREAFEDASDSVVVRAGAKVLPFGFHQSPLLATLVLEQSALGKFLIGLAAEGLTVSVYMDDILISSNDRDRLEAVSDELVSIATDAGFPLSTSKSAVAMEEAEVFNCLLSEQKIRFLDRRMAKFIADHGVASEAGQLAIQGYIRAVSNDEHEVFLARLAQPVDAAQDGVTVRWFGDAK

SEQ ID NO: 1187 - protein, 248 aa, unidentified
  source 1..248: note = uncultivated organism;MG160-198 reverse transcriptase
MFVPTPEEVLFGNYLKSDLERLWDPPGYYYHLQSGGHLAALGVHTCMPHYLRLDIKNFFGCINRTRVTRHLKKYYPYKKARTYADRSTVRLPNSEPLTYILPFGFVQSPLLASLSLRNSKLGRVLDDAAKSSMFNVSVYVDDLLVSSQDKAALQDKAEEIIGAANKAGFVINEEKSSGISSEVEAFNICLSPQGLAIIEPRMRAFLKSLENANSMDKVRGIINYVRRVNTHQAEQLWNYFNEQNYRRS

SEQ ID NO: 1188 - protein, 241 aa, unidentified
  source 1..241: note = uncultivated organism;MG160-199 reverse transcriptase
MSLQDLTLVSSDSKASGIKIKSAIEDCWTPPDNYYHLRNGGHVAAMKAHCSNTCFIHLDIKNFFGAINKSRVTRCLKRHFGYSDARLIARESTVKHPTNPKKYILPFGFVQSPIIASICLFKSSLGKHLNKLSFTKDVVVSVYMDDIIISMEDEDMADDILCEVKCAADKSRLPLNEIKEEGPADQVTAFNINLSHKNLKIDDVRLSEFIDNFTLSGNDAQRKGIRQYIKSVNTDQSQKLV

SEQ ID NO: 1189 - protein, 257 aa, unidentified
  source 1..257: note = uncultivated organism;MG160-200 reverse transcriptase
MHESFESRWTSRFEIKLNAWVFVPTPEFIEYGTKVKQAITEKWRSPNYYYHLRSGGHVQALKKHTKHQYFIHLDIQNFFGQINRSRATRCLKEHFSYSEARTIAIKSTVALPRSTKKKYILPFGFVQSAIVASLCLHKSTLGKYLLYLAKQNNLAVSVYMDDIIISSDNQQQLEEVLASVEVAAEKAGFPLNKTKQEGPCDQITAFNILLTGNGLKITEKRLNEFVEVFKASTNPNQKDGILNYIKCISIKQVSLLK

SEQ ID NO: 1190 - protein, 235 aa, unidentified
  source 1..235: note = uncultivated organism;MG160-201 reverse transcriptase
MPTPEFIEYGTEIKQIIAKRWCSPNYYYHLRNGGHVSALKKHLKHQYFIHLDIQNFFGQINRSRATRCLKEYLSYSEARTIAIKSTVALPRSDKKKYILPFGFVQSTVIASLCLHKSTLGKCLHQLAKQNDLSVSVYMDDIIISSNNLQRLEEVLVSVEAAAEKAGFPLNKAKQEGPCNTITAFNILLTENELEITEARLNEFIEAFKASTNPNQKDGISNYISCVNTKQSALFL

SEQ ID NO: 1191 - protein, 245 aa, unidentified
  source 1..245: note = uncultivated organism;MG160-202 reverse transcriptase
MPVRFENYSHSFLLNGKHVFAPSELGRRIGKDIKQRVEDAFSFKDFYYHMKEGGHVEALHLHRPNKYFCKVDIENFFYSIARNRVVRALRLIRVPRATHYGKWSCVKNPYAGPSYALPYGFVQSPILATLVLENSEVGRALSRLTSDVTVAVYVDDISLSSNDLSLLRTRYDELLHAIDAAGFIVNSGKCVAPCSDLTIFNCNLRSGETSVTRDRVAEFYITPPSPARLAGFERYCASVERGNAH

SEQ ID NO: 1192 - protein, 203 aa, unidentified
  source 1..203: note = uncultivated organism;MG160-203 reverse transcriptase
MPAKWAIKYQLKPGRWVFEPTKETKAAGEEIRKAICEKWHPPVTYYHLRSGGHVRALQSHLHHKYFIRADIDDFFGSVNRSRITRCLKGQFGYAQARRMAILSTVPHPAESARWMLPYGFVQSPILASLSLACSRLGTYLAALSKVDGVAVSVYVDDIVVSSNCISSLTECLTKLTGVAEKSGFLLNDAKVQGPAMSIIVFNI

SEQ ID NO: 1193 - protein, 256 aa, unidentified
  source 1..256: note = uncultivated organism;MG160-204 reverse transcriptase
MPKNARWSSKFEIKPGSWVFVPTDETVKYGQKIKKAIEDRWSPPGFYYHLRDGGHVQALSSHTNNDFFIHLDISNFFGRINKSRVTRCLKGVFSYNQAREIAVESTVRDPNDPGVGTYILPFGFGQSPLIASLCLQQSRLGRFLSDLNNMGAYKVSVYMDDIVISSNSDTGLSNVLREVKPIAEKSGFPLNEAKEEGPAEKITAFNIELSNGVLTLTEERLKDFIAAYRESDNFNVISGIFGYVMTVNKGQAEKIV

SEQ ID NO: 1194 - protein, 274 aa, unidentified
  source 1..274: note = uncultivated organism;MG160-205 reverse transcriptase
MESTCAKTSVSALADLLGIEVPYLRRLAGKAPKLYRCWDEAKKNGGKRRIEAPHPNLKIVQRKLAVSLLDQIPVDQSLHGKPGTSQMSAARLHVHQHTVMTMDLSDFFPSVTSRSLMRVLKRNGFSEEVADLVCRLCTHRKRLPQGAPTSPVLARIVVSAAAKRIRSATGTASPAVRVTQYVDDLAISGPQGIERFENLIRKIYEQDGLRINSQKTRVMRGSETKEVLGLKVNERLEISDSFAKELANARQTMARTDRRLLGKEAWKRRVERSN

SEQ ID NO: 1195 - protein, 289 aa, unidentified
  source 1..289: note = uncultivated organism;MG160-206 reverse transcriptase
MSVPKDLASACGMSQEDIQKILSHKVYYKHSIKKKNKKLRVLYEPNEELMKLQHRLYENVLKDFDLCPGINGVPKTSIRDYINPHVEKDYVLVADVKRYFPSVKRKYVLNGLEFLNALDSSWYSPIASMVTYRGTLPQGAPTSAFMAGIAIQPIFTKLNEYAKSVDVDITVYVDDWAISGNDSKAVLKVFARLKRQMSKYDLFFSENKTHYMKVKEKQEIMGIMVGYGLKITSRYQEEVRKDICNLKNEDEFTKDDNIRSIKGKLNFIKSFDKQTFKELNKLYTKEIEA

SEQ ID NO: 1196 - protein, 256 aa, unidentified
  source 1..256: note = uncultivated organism;MG160-207 reverse transcriptase
MPKNARWSSKFEIKPGSWVFVPTDETVKYGQKIKKAIEDRWSPPGFYYHLRDGGHVQALSSHTNNDFFIHLDISNFFGRINKSRVTRCLKGVFSYNQAREIAVESTVRDPNDPGVGKYILPFGFVQSPLIASLCLQQSRLGRFLSDLNNMGAYKVSVYMDDIVISSNSDTGLSNVLREVKPIAEKSGFPLNEAKEEGPAEKITAFNIELSNGVLTLTEERLKDFIAAYRESDNFNVISGIFGYVMTVNKGQAEKIV

SEQ ID NO: 1197 - protein, 233 aa, unidentified
  source 1..233: note = uncultivated organism;MG160-208 reverse transcriptase
MPSEEGRALGLEVQTEVQKVWCAPDYYFHLKKGGHVAAIQHHLPSVSFVRLDLTNFFGSITATRITRSLRTLLGYARAREIALLSTVSPPGAPGSRALPYGFVQSPLLASMCLAESALGRQLHRISLDQDARVSVYVDDIIVSANDLTTASTIKTKLEDAASRAGFQFNFVKTQGPAPEVNAFNIELSQDAMRVAQDRFLEFQSRYRTDPQEQVRQALLAYVRSVNTQQADSM

SEQ ID NO: 1198 - protein, 252 aa, unidentified
  source 1..252: note = uncultivated organism;MG160-209 reverse transcriptase
MQTKWQQKYQRSPGKWVFVPTEESRAEGKAIKEAVEDKWQPPTYYYHLRAGGHVASLRSHVNNTYFLRLDIQDFFGSVTRSRVTRSLKKIFGYERARQMANDSTVKHPADKNRAMLPYGFVQSPTLASLALFDSRLGGYLEQLKKIKYVVVSVYMDDIIVSTKRKKRLADIHKELVAASVKSRFNFQPDKTEGPAIKISAFNIELGSGDIQVTPERLQEFYDAFKKTSSLLEKNGIAGYVSSVNPAQATLLV

SEQ ID NO: 1199 - protein, 268 aa, unidentified
  source 1..268: note = uncultivated organism;MG160-210 reverse transcriptase
MPPLPSSSTWAVTTAAMQTKWQHKYQRSPGKWVFVPTEESRAEGKAIKEAVEDKWQPPTYYYHLRAGGHVASLRSHVNNTYFLRLDIQDFFGSVTRSRVTRSLKKIFGYERARQMANDSTVKHPADKNRAMLPYGFVQSPTLASLALFDSRLGGYLEQLKKIKYVVVSVYMDDIIVSTKRKKRLADIHKELVAASVKSRFNFQPDKTEGPAIKISAFNIELGSGDIQVTPERLQEFYDAFKKTSSLLEKNGIAGYVSSVNPAQATLLV

SEQ ID NO: 1200 - protein, 253 aa, unidentified
  source 1..253: note = uncultivated organism;MG160-211 reverse transcriptase
MALRNYEYRFELKPGKYVYVPDKQSKKIGDRIVSEVMKKWRPAEYMCHFGKKGGHLAALRPHTRNKFLASIDLRRFFESISRTKVHRSLMKIGFDSRRAFDIAEISCVSFGGRKFLPYGFVQSMALATLAIEKGLLGKVVGDCRLEGIFVTMYVDDIIMSSNSLIDLEVAYGRVISAIGEANLSVSGEKCSLPDLQVDAFNCTARNLNMELTRTRFDKFQSALIAASPRRRIAILRYVGVINAHQHSLLSIVT

SEQ ID NO: 1201 - protein, 271 aa, unidentified
  source 1..271: note = uncultivated organism;MG160-212 reverse transcriptase
MAQILENLSVDSLAVKLGLSKTALIDLAKDVPRLYYEVSIPKKDGSERKLEIPLPILKKLQKRLLDRIIHKIPTHPKLYGRSGTSTKKAVKEHVKKETVITMDITNFFLSTKSAFVKNMLIENGSRDDVAKLLTRLVTHKKHLPQGAPTSPCVARLMLQGFAEGLEKFLKQIPYSAFSIYVDDITISGPKGIKHAKSIVKKILKRYGYDINESKTKIMNQTEEQISLNIRLNERIEATTQFLKEIEELEKEVPPYDAQLLGKKSYIKYLMK

SEQ ID NO: 1202 - protein, 270 aa, unidentified
  source 1..270: note = uncultivated organism;MG160-213 reverse transcriptase
MDLSKITIKDIALLLKITEGNLAKLSEKAPHMYYTSGMQKRNGGIRIIEAPYTSLKKIQKILLSQLFSGLPYDPILFGGKGSSTQKAVQHHTRKSLVMTLDIKDFFPNIKSHKVKKMFTRRGAKPDVAALLTRLVTYKNHLPQGAPTSPCIARLILHPVAIHIKRAVCSVKARIEPSIWVDDIIISGPKGLKRLKKTLISILTRYDFQIPEEKFRIMSDNQEQVSLGIRLNDGIGVPSSYLQKYKDECKKLGSSSKRCQGMKAHIRNLQN

SEQ ID NO: 1203 - protein, 270 aa, unidentified
  source 1..270: note = uncultivated organism;MG160-214 reverse transcriptase
MDLSEITIKDIALLLKITEENLAKLSEKAPHMYYTREMRKRNGGIRIIEAPHTSLNKIQKILLDQLFSGLSYDPILFGGKGSSTKKAVRRHTRKALVITLDIKDFFPNVKSHKVKKMFIRRGAKHDVADLLTRLVTYKNHLPQGAPTSPCIARLILNPVAIHIKRVVRSVKARIEPSIWVDDIIISGPKGLKRLKKTLISIFNRYDFQIPEEKFKIMPDNQEQVSLGIRLNDGIGVPSSYLQKYKAECKKLGASSKRCQGMKAHIRNLQN

SEQ ID NO: 1204 - protein, 271 aa, unidentified
  source 1..271: note = uncultivated organism;MG160-215 reverse transcriptase
MAQILENLSVDSLAVKLGLSKTALIDLAKDVPRLYYEVSIPKKDGSERKLEIPLPILKKLQKRLLDRIIHKIPTHPKLYGRSGTSTKKAVKEHVKKETVITMDITNFFLSTKSAFVKNMLIENGSRDDVAKLLTRLVTHKKHLPQGSPTSPCIARLMLQGFAEGLEKFLKQIPYSAFSIYVDDITISGPKGIKHAKSIVKKILKRYGYDINESKTKIMNQTEEQISLNIRLNERIEATTQFLKEIEELEKEVPPYDAQLLGKKSYIKYLMK

SEQ ID NO: 1205 - protein, 272 aa, unidentified
  source 1..272: note = uncultivated organism;MG160-216 reverse transcriptase
MRKILEDLDLSSLSQILGISLQELQDISEIAPKLYSFSQIPKKNGKSRKLEIPHQNLKKTQKIILQKILNQMELHPKLYGGPGTSTKKAAYIHTKKHLLITSDIKDFFPSVKAHHIRKMFLRYGASREISNMLTRLVTHSNHLPQGSPTSPAIGRFVLQPFAEEFENILSKIPRAAFSVYVDDIILSGPETIKGFLSTIRKILFRYGLEINDKTKLMYRHEEQICLNIRVNNGIAPPTSYINELRELSKIFPLSHPKLKGKYSYVAYLKRSD

SEQ ID NO: 1206 - protein, 255 aa, unidentified
  source 1..255: note = uncultivated organism;MG160-217 reverse transcriptase
MPVKFETYRYSYLRKGKPVFVPSERCEAIGRELKAQVEAATDFEDIYYHLRKGGHVAALHAHRDHRYFARVDIERFFYGIGRNRVARELHAIGIGKAGYLAKWSCVKNPFGEPGHALPYGFVQSPILATLVLMRSGAGAFLRVLPAVVTASVYMDDIALSSDDLPALEAAYADLRKALQASNFRINENKAHGPDEAVELFNCELSQCFASVLQARREEFFAKEDRSAASVSAFMRYCDQIEHGNMSAAIPEAALG

SEQ ID NO: 1207 - protein, 271 aa, unidentified
  source 1..271: note = uncultivated organism;MG160-218 reverse transcriptase
MDLSKITIKDIALLINTTEDDLIRLSEKAPHMYYSRKRRKPNGEYRNIETPHDHLKKIQKILLDQLLSKLQFDPILFGGKGSSTKKAVRRHTRKPLVMTMDIKDFFPNVKSHKVRRMFLSRGAKRNVADLLTRLVTRKNHLPQGAPTSPCIARLVLDPVTKDLKKAIQSMGAKEKPSIWVDDVIISGARGLKRSKKTLISIFNRYGFQIPEEKIKTMPKIQEQVSLGIKLNDGIAVPLRYFQKYEAECKQLGPSSARCKGMRANIKNLEKG

SEQ ID NO: 1208 - protein, 255 aa, unidentified
  source 1..255: note = uncultivated organism;MG160-219 reverse transcriptase
MNTNPKWTHKFEIKPDSWVFVPSDFSVQEGKNIKEQIEKKWQPSAAYYHLKAGGHVAALKSHMKNKYFLRLDIENFFGSINRSRITRTLKPYFSYETAREIAVNSTVVIPNSFPKKYMLPFGFIQSPILASICLEKSSLGKFSNSLLGQSGVTVTIYMDDIIISTNDNELLMEISEKIKTVSNKSGFGINPRKQEGPSEQITAFNIKLSHKNLEISDDRMIEFLFAYKNSESYYQKKGIASYVGTVNPLQAEKFD

SEQ ID NO: 1209 - protein, 279 aa, unidentified
  source 1..279: note = uncultivated organism;MG160-220 reverse transcriptase
MGNTEELEELLTEYPADARVFCTLEPKPDATTRPIVKPNKSLNKWLKQVKLALYKQRKDWPTFIHGGVRKRSYVSFVRPHTNKKTVITIDIRNCFGSIRQQEVQTALVKKLGLSDGLASRLATKLCYKRRVPQGFATSSYLTNLYLNDTLLRINRQMRRKQIDMTIYVDDIALSAQHIDSAEIINLVSLELSRARLAISKAKVKVMHAHKPQVICGLIVNKGAALTRQKRKEIFSDVANGRMSETSLQGWLANLNMVDETLMRKLRAYAIKKGVLRAGA

SEQ ID NO: 1210 - protein, 279 aa, unidentified
  source 1..279: note = uncultivated organism;MG160-221 reverse transcriptase
MNTSEQIEKLLATYPSDAKAWSSREPKPSGGFRKITKPNKSLGKWLQHPNKELNTVQPNWPTFMHGGLKKHSYVTHARPHVNKPCVITIDIRKCFDSISTQQVAACLEAELIISSKLAATLSERLCFKGAVPQGFATSNFVSNLYLRKSLISIARMLKPQNLVLTNYVDDIAVSGRISDTGSVINVIAQELSKSGLAINKSRDKVKVMSSGQRQIICGLQVNRKLTITKSKKLELFSLVARGKISEVSLNGWLSNLHNVDPNFQRQLSVFAIKKGLLTQ

SEQ ID NO: 1211 - protein, 406 aa, unidentified
  source 1..406: note = uncultivated organism;MG160-222 reverse transcriptase
MNAKNGNSCAGSVLAVKSLRRLKRSIQKQHRKGIDVVEGAIRKIEHGYSKEALLSLERLRFIGLTAEELMLVDDTIDMLKVRSDSKLKTVTLGYVTSLTYKLAVDQSISFAIAEAVKYTLPFLISFQYQSVNKIPTQSFIEHELGLTQAEFVALCNRAPKSYFKDVQTKPSGGHRVIYKPHGCIKKHQRKLNQVLSKFPVASGICGGPGTTIMSAMKPHCHNPLLLTLDLKNFFPSIGQKRVEKLFHDVLDDQAMAPAFTRLCTTDRILPQGAPTSSTIARIIVEPAFVALQAALRKMHPNCEATIWVDDIVVSGPLGIRRAKNVLAKVFERFGFTVNQDKTKVMFGDAERSSLGLTLRDVIYPSAEVIKKFEACKRETPENFRSIAGYINFFKDVAKANDQYALT

SEQ ID NO: 1212 - protein, 257 aa, unidentified
  source 1..257: note = uncultivated organism;MG160-223 reverse transcriptase
MSTSKRWIHKFQIKNNVWVFVPDNESRRYGNEIKSNIDKKWKKPSYYYHFRDGGHVAALKSHINNTFFIHADIQDFFGAINKSRVTRNLKSFFGYKIAREIAEKSTVQCPHSNVKKYVLPFGFVQSPILASFCLHKSRLGVYLDKLYDSGDFKVSVYMDDIIISGKKLEDLNEILVKLNSISDHSGFQLNIKKTQISSTIKSFNIELSHNKLRISKERMCEFISHYMSGGKYRRIGILCYISTVNKKQLRVFKLIDK

SEQ ID NO: 1213 - protein, 271 aa, unidentified
  source 1..271: note = uncultivated organism;MG160-224 reverse transcriptase
MTDNLENLNLSSLSKIVGIPVQELLNISEIAPKLYYHSLIPKKNGKHRKLEIPHSNLKRIQTIILHEILDKLDIHPDLFGGPGTSTKKAAQAHVRKHLLITTDIKDFFPGVKSYHIRNMFLRQRASLEISGILTRLVTHNNHLPQGSPTSPAIGRLVLQPFAEELENILNKIPRAAFSIYVDDIILSGPKGIKGFLSTIRKMLLRYGLKINNKTKLMYRNQEQVCLNIRVNDGIAPPISYLNELKELSKIYPSSHPKIKGKASYMKYLKKP

SEQ ID NO: 1214 - protein, 252 aa, unidentified
  source 1..252: note = uncultivated organism;MG160-225 reverse transcriptase
MLELSEDAPFLYRKVRIPKNDKEFRQLEIPHQILKNFQRRLLHRVFDKFPIHPKIFGGPKSSTKKAVASHIKKPVVITMDIKNFFPSVKKHYINDAFHAFGINKDLSTILTRLVTFHNHLPQGAPTSPCIGRMVLNPFAFELNKMMKRIHPNATFSIYVDDITLSGPEGIKRIIPTICKVLGRHGFNIKKEKTQIMYRNNEQVSLNIRLNERIEATKKYLAEIEELEKHLAPWDPRLLSRKAYVKYLSKPIY

SEQ ID NO: 1215 - protein, 253 aa, unidentified
  source 1..253: note = uncultivated organism;MG160-226 reverse transcriptase
MVPKWSSKFELKPSKWVFVPTEESKENGAKIKAAIQECWSPPSYYYHLRSGGHVEAVKSHLGHTTFLHVDIQDFFGSINRSRVTRNLKAKFSYEVAREIANASTVRHPDDKDRYIIPYGFVQSQIVAALCLDQSRLGTYLGKLCKQKDVALSVYVDDIIVSCADANQANSILVGLIAAAESAGFTLNPDKQEGPAAEITAFNILVANASMAIEGNRLAKFVEALAVTSSEPQRAGILSYVKSVNAVQSDSLVV

SEQ ID NO: 1216 - protein, 252 aa, unidentified
  source 1..252: note = uncultivated organism;MG160-227 reverse transcriptase
MQSKWKSRFQLKPGKWVFVPTDESIRLGHEIKSAIENVWLPPDNYFHLRSGGHVGAIRSHMPSKFFLRIDIQNFFASINRTRITRCLNKFFSYQKARDWANASTVIAPTGEKRTILPFGFVQSQLISAVCFSESALGRCLAGIHCDKSLRVSVYVDDIIVSSDKKEACGSALEKIRVAADRSRFKLNEEKLEGPSESITVFNVILSNQRIEIQASRMKDFKKTFASTTNEYEKAGILSYVSSINLDQAAELQ

SEQ ID NO: 1217 - protein, 257 aa, unidentified
  source 1..257: note = uncultivated organism;MG160-228 reverse transcriptase
MPPTEKWKSKFQIKSNSWVFVPNDESVRYGKEVKLTLEKRWSAPDFYYHLKDGGHVKALKSHTGHQFFIHLDIKDFFGSINRSRITRCLKRYFGYTSAREIAEKSTVMLPNNAVKKYILPFGFVQSPIIASICLDKSGLNQCLYRLSKTPDIAVSVYVDDIIISGNNLLFLSQKLSDIKNAAIKSGFALNPEKEEGPSEKITAFNIELSHREVELIASRFNKFCDEYKSSANPNQRKGIIGYISSVKSTQADDLQKL

SEQ ID NO: 1218 - protein, 274 aa, unidentified
  source 1..274: note = uncultivated organism;MG160-229 reverse transcriptase
MDKPIDLTSERLSSILGIPTDAILELAKDAPFLYLKVKIPKNEKEFRKLEIPHPILKSFQRQLLHKVFDKFNTHPCLYGGRESSTKKAVHAHIKKPIVITMDIRNFFPSVKKYSIINALNTFGISEDLSMIVARLVSCHNHLPQGAPTSPCIGRLVLNQFAVELDSMLKGIHSNSAFSIYVDDITISGPEGIKRIIPTVEKMLFRHGYKIRKGKTQVMHRSDEQISLNIRLNNRIEATSIFLAEIEELEKRLPPWNPKILGKKAYVKYLLKPLS

SEQ ID NO: 1219 - protein, 248 aa, unidentified
  source 1..248: note = uncultivated organism;MG160-230 reverse transcriptase
MPVHIRNFEYSYIRNNKPIFVPTGIGRRIGQEIKYKVEKAHKFDDFQFHLRRGGHVAAIHSHRDGLFFAKIDIANFFYSVSRRRVQSALARIGLDSPRFFAKWSAVKNPYGLPEFAIPYGFVQSPILASLVFYFSETANFIRSAIGDINISVYVDDISISSKCEISVAQAYAEINRLLPEDGFQINDQKLAPPAADIVLFNCELKNQLAEVQEARIAKFFSVERSPAAEEAFAAYCASVERGNLKSGD

SEQ ID NO: 1220 - protein, 274 aa, unidentified
  source 1..274: note = uncultivated organism;MG160-231 reverse transcriptase
MEKIVDLTCEKLTSFLSIPIEIILELAEDAPFLYHKARIPKNDKGLRKLEIPHQILKCFQRQLLHKVFDKFQTHPCLYGGPKSSAKKAVYAHVRKPIVITMDIRNFFPSIKKHKVIDALNFFGVNKDLSIILARLVTSHNHLPQGAPTSPCIGRLVLNPFAYELDKMLKGIHPSSAFSIYFDDITISGPEGIKRIIPIVDKMLIRHGYELKKEKTQIMKKCDEQVSLNIRLNKKIEATNKFQAQIEELEKQLPPWNPKLLGKKAYVRYLSRPLC

SEQ ID NO: 1221 - protein, 251 aa, unidentified
  source 1..251: note = uncultivated organism;MG160-232 reverse transcriptase
MQSKWKSRFQLKPGKWVFVPTDESIRLGHEIKSAIENVWLPPENYFHLRSGGHVGAIRSHMPSKFFLRIDIQNFFASINRTRITRCLNKFFSYQKARDWANASTVIAPTGEKRTILPFGFVQSQLISAVCFSESALGRCLAGIHCDKSLRVSVYVDDIIVSSDKKEACGSALEKIRVAADRSRFKLNEEKLEGPSESITVFNVILSNQRIEIQASRMKDFKKTFASTTNEYEKAGILSYVSSINLDQAAEL

SEQ ID NO: 1222 - protein, 271 aa, unidentified
  source 1..271: note = uncultivated organism;MG160-233 reverse transcriptase
MTDNLENLILSSLSKIVGIPVQELLNISEIAPKLYYHSLIPKKNGKHRKLEIPHSNLKRIQTIILHEILDKLDIHPDLFGGPGTSTKKAAQAHVRKHLLITTDIKDFFPGVKSYHIRNMFLRQRASLEISGILTRLVTHNNHLPQGSPTSPAIGRLVLQPFAEELENILNKIPRAAFSIYVDDIILSGPKGIKGFLSTIRKMLLRYGLKINNKTKLMYRNQEQVCLNIRVNDGIAPPISYLNELKELSKIYPSSHPKIKGKASYMKYLKKP

SEQ ID NO: 1223 - protein, 257 aa, unidentified
  source 1..257: note = uncultivated organism;MG160-234 reverse transcriptase
MPPTEKWKSKFQIKSNSWVFVPNDESVRYGKEVKLTLEKRWSAPDFYYHLKDGGHVKALKSHTGHQFFIHLDIKDFFGSINRSRITRCLKRYFGYTSAREIAEKSTVMLPNNAVKKYILPFGFVQSPIIASICLDKSGLNQCLYRLSKTPDIAVSVYVDDIIISGNNLLFLSQKLSDIKNAAIKSGFALNPEKEEGPSDKITAFNIELSHRELKLIDSRFNEFFDEYKSSANPNQRKGIIGYISSVNSTQADDLQKL

SEQ ID NO: 1224 - protein, 257 aa, unidentified
  source 1..257: note = uncultivated organism;MG160-235 reverse transcriptase
MSTSKRWIHKFQIKNNVWVFVPDNESRRYGNEIKSNIDKKWKKPSYYYHFRDGGHVAALKSHINNTFFIHADIQDFFGAINKSRVTRNLKSFFGYKIAREIAEKSTVQCPHSNVKKYVLPFGFVQSPILASFCLHKSRLGVYLDKLYDSGDFKVSVYMDDIIISGKKLEDLNEILVKLNSISDHSGFQLNIKKTQISSTIKSFNIELSHNKLRISKERMCEFISHYMSGGKYRRIGILCYISTVNKKQLRYFKLIDK

SEQ ID NO: 1225 - protein, 244 aa, unidentified
  source 1..244: note = uncultivated organism;MG160-236 reverse transcriptase
MIENYKFKYRSRGKIIFVPNERCERKGRRIIKFFSKRVDFPGYFFHYKSGGHVAALHAHLGNTLFFKIDIQNFYYSIARMRVTRALRSWGYPGAGTLAKWSCVANPMAGPRHVLPIGFFQSPLLASLVLMKSPVAQAIERAIANGVCISVYLDDFLGSHNDAHVLEAAYADIRDTCTSSGLVPNPNKLVPPSAAITAFNCDLTHGSARVRNDRIARYYAAPTRTPESDAAFEQYRLLIASANTA

SEQ ID NO: 1226 - protein, 248 aa, unidentified
  source 1..248: note = uncultivated organism;MG160-237 reverse transcriptase
MIENYKFKYRSRGKFIFVPNERCERKGRRIIKFFSKRVDFPDYFFHYKLGGHVAALHAHLNNKLFFKIDIQNFFYSIARMRVTRALRNWGYPGAGTLAKWSCVANPGPGPKYVLPIGFVQSPLLASLVLMRSPVAEAIDRARTNGVVISVYLDDFIGSHDNEGALGVAYEDIRASCVKAHLIPNPNKLVPPNTAITAFNCDLTQGSAKLTDDRIARFFSVARSAASQSAFEDYKVRVASANLRTLNSE

SEQ ID NO: 1227 - protein, 237 aa, unidentified
  source 1..237: note = uncultivated organism;MG160-238 reverse transcriptase
MAKFGKEIKLAIEGWWAPPPYFYHLRAGGHVAALKAHLGHSMFLRLDVQDFFGSVSRTRVTRCLKKKFGYEKAREWANASTVTHPSHAKRTMLPFGFVQSPILASLCLAKSSLGSCLSKVYRNKDLAVSVYVDDIILSSRRPDVLDEGFLGGLRTAAERARFAFSAEKAQGPSPTIKAFNIELCKESVRIDEERMKAFVEALNKSESQPQRAGIVSYISSVNADQGKDAAELAAASP

SEQ ID NO: 1228 - protein, 281 aa, unidentified
  source 1..281: note = uncultivated organism;MG160-239 reverse transcriptase
MNLSDLSIHTLSNMLNLSDKDLAHLSQQAPLLYNSYKIRKKSGKLRLIEAPHGNLKIIQKLLLDRLLSKLHADPILFGFKGSSTISALRDHTHMPLVLTMDIKDIFPSVKSYMVRKMILRHGAKNDLAVLLTRLVTRKNHLPQGAPTSPCVARLVLHHLVEHLKGAIRSTTDRARISIWVDDVTFSGPIGLKRLKKTLISIFNRNGFIIPENKVKIMPNNIEQESLGIRLNEGIGVTSSYIQKYKDECKRLGASSRRCRGMLARIKYLQAVNQLSPNGNLK

SEQ ID NO: 1229 - protein, 266 aa, unidentified
  source 1..266: note = uncultivated organism;MG160-240 reverse transcriptase
MPAKWQHRFERKPGRWVFVPTPEARAAGLEVKNLIESRWKAPNYFFHLRKGGHIAALRRHRQSTCFVKADIADFFGSVSRSRISRLLKEFFSHDEALRIATSSTVRHPLNDKRKILPYGFIQSPLLASLALHKSGIGKYLDALHRDKRFVVTVYMDDIIVSGSDQDELLDVLTEMKDKAQRSGLVFGREKEQGPSESISAFNIELARQTPISLLPPKLEEFSEAFRTSTSDLQRAGIQGYVYSVNPTQADSLPSRSKEAGGGPKTP

SEQ ID NO: 1230 - protein, 245 aa, unidentified
  source 1..245: note = uncultivated organism;MG160-241 reverse transcriptase
MPVAIPNFDYSYLRKGKPVFVPTKMGRRIGHEIKGKVESAYAFDPIYFHLRRGGHVAAMHYHRDNQHFARIDISNFFYNISRRRVQSAMERVGMGNVRFYAQWSTVSNPYGNPKYVLPYGFVQSPILASLTIATSDVGSHLVGLPPNIKVAVYVDDISLSSNDPDALQRVFDATLAIVESDGFSINPNKLRPPSPVIDLFNCDLQHGKTTVTDERIQAFLSNHPSQNAQDAFATYCASVERGNQP

SEQ ID NO: 1231 - protein, 221 aa, unidentified
  source 1..221: note = uncultivated organism;MG160-242 reverse transcriptase
MVKAILKRWSPNASMYHLKKKGGHVAAMRPHIGKSYHASVDLTNFFGSVSRTKVHRALMKIGFRNRQALDIASESCVELGGRKFLPYGFPQSMILASLVLEKSVLGATISDLRASGTIVTVYVDDILLSAETLEELREAYDRVLESVVLSGFEPSVKKSEPPSTEIHSFNCRISDRLEILEERMERFKEQVKLATPRGRAALLRYVGVINGDQARSLASNP

SEQ ID NO: 1232 - protein, 274 aa, unidentified
  source 1..274: note = uncultivated organism;MG160-243 reverse transcriptase
MSIKLGDLDLNSLSIILGISSQKILKLSKIAPILYHEVTISQKNGKTRKIEIPDHKLKKAQKIILHEIFYKLPIHPLIFGGPGSSTKKAALLHTRKHVLIAADIQDFFPSIKSFQIKRMLQYHGATEDISDLLTRLSTHKNHLPQGAPTSPAIGRLVLEPFARELENILKKIPQSSLSIYVDDIILSGPKGVKRFLPTIKKMLTRYGLKINNKTKIMFKDEEQICLNIRVNDGIAPPTAYVQEMQELSKLVPPSDPRLKGKKSYIDYLKRPIIN

SEQ ID NO: 1233 - protein, 255 aa, unidentified
  source 1..255: note = uncultivated organism;MG160-244 reverse transcriptase
MSSTEKWISKFQYKHSWVFVPTKETAQYGKIVKLSIEKYWSAPDFYYHLRDGGHVKALKSHIGNQFFIHLDIKNFFNSINRSRVTRSLKDFFEYSNARQIAVASTVRLPESSIKKYILPFGFVQSPIIASICFHKSRLSKYLYNLNKLGDVIVSVYVDDIIISGNDFSSLQKILDEVKLAAEKSGFPLNPEKEEGPSEKITAFNIEISHGLLKITDSRFNDFYEAYKASDNINQREGIAGYVSSVNQDQANDLYN

SEQ ID NO: 1234 - protein, 258 aa, unidentified
  source 1..258: note = uncultivated organism;MG160-245 reverse transcriptase
MHSYPRWHHKYKLKHDVWVFEPTEETIQIGNEIKNAVQDKWIVPDNYYHLNLGGHVAALNLHKTDTVFVHLDIKKFFNTINKSRITRSLKYLFDYPTSRNYALLSTVKHPDKSPTIFILPYGFVQSPILASLCLRQSALGIKIENLSKSSLIRISVYMDDIIISGSDESYISVLVSELKLAAEKSGFILHKEEGPAQEITAFNIRLSNNKTVIIDSRYKELWDDYNGTTNNNVKHGIATYVSTVNNIQSVGLDGPLTY

SEQ ID NO: 1235 - protein, 217 aa, unidentified
  source 1..217: note = uncultivated organism;MG160-246 reverse transcriptase
MQARWSEKFELKPGRWVFVPTDESRQKGTVIKNEILKFWAPPDYMYQFRSGGHVAALQAHLEGNWFIRVDLRDCFGSINRTRVTRCLKRLFGYALAREWANASVVRLPNESRWFLPFGFVQSPVIAALCLAQSALGSFLQSLNKEKAIVATTYVDDIIISTESEDRAFTVFNELMTAVNRARFEVNHSKTSGPSTSITVFNLDLKEPLQNLAVRRQV

SEQ ID NO: 1236 - protein, 280 aa, unidentified
  source 1..280: note = uncultivated organism;MG160-247 reverse transcriptase
MAIEFENFLYSYSKKRKRIFVPNRFSCNLGKKLKRKIAKKYRFDSFVYHFRKGSHIAALHRHRKNKFFCRLDINRFFYSIRRNRIKRALKQIGIEKPEYFAKWSTVRNPYEGGGYVLPYGFVQSPVLATLVLALSPIGAYLRGLPKTITCSVYMDDLCLSGPNLAELKAAFDGLVAAVEQAGFTLNDKKTREPAEQIDIFNCSLANDSTAVLQDRVDEFYANERSEAAVDAFETYCDIVQSKTWRHGPSKKKRNKVYTERRKKAAPTTPLPEEEPREIAS

SEQ ID NO: 1237 - protein, 277 aa, unidentified
  source 1..277: note = uncultivated organism;MG160-248 reverse transcriptase
MTAADRISYLLDRYPVDTSVQRWHRAKLGGGQRSIVTPNDALKRWLRLMNAALIRQFNDWPSFMHGGIKKRGYVTHARQHVARPCVITIDIKSCFDSITEREVADAMQRHLGLDDDVCARLANVLCFRGAVAQGFPTSNYICNLYLLDPLSSMHSRLSVRHIRLSNYVDDIAVSGAIVAPGELVNEIALNLSRAKLSMNKAKVSVMPSSKRQVVCGLVVNKRLSLTSTLKLKLLGDVAHGRMSPASIAGWIANLKSIDPVFGTKLHQLAMRKGLLKS

SEQ ID NO: 1238 - protein, 234 aa, unidentified
  source 1..234: note = uncultivated organism;MG160-249 reverse transcriptase
MYHFRKGSHIAALHRHRKNKFFCRLDINRFFYSIRRNRIKRALKQIGIEKPEYFAKWSTVRNPYEGGGYVLPYGFVQSPVLATLVLALSPIGAYLRGLPKTITCSVYMDDLCLSGPNLAELKAAFDGLVAAVEQAGFTLNDKKTREPAEQIDIFNCSLANDSTAVLQDRVDEFYANERSEAAVDAFETYCDIVQSKTWRHGPSKKKRNKVYTERRKKAAPTTPLPEEEPREIAS

SEQ ID NO: 1239 - protein, 281 aa, unidentified
  source 1..281: note = uncultivated organism;MG160-250 reverse transcriptase
MKTKAETFEKLLNSYPNDASIFRTSIEKRDGGTRPIVKPNKVLRLWLRQVLRALRGARKDWPVFIHGGVRKRSYVSFVKPHTSKKLVVTIDIRNCFGSITGKQIVEALVVKLKMPHDLAKKLAAQLCVDGKIPQGFATSNFLTNLYLNDALLAINRRLARKGVSMTTYVDDIAISGNDFDPAEVINIVCEELSRARLAIKKAKVKVMRSNTRQVVVGLVVNKGVAISKEKRKEIFSLVSSRTMSEESLAGWISNLNMFDKPLMRKLKSFAVRKGYAIPEKK

SEQ ID NO: 1240 - protein, 251 aa, unidentified
  source 1..251: note = uncultivated organism;MG160-251 reverse transcriptase
MPVQFQNYEYSYLRDGKPVFVPSPVGKKIGYDIKGKVEESFEFDHFVYHFLPGGHVSALHAHRGNHIFARVDIETFFYGIGRNRVTKALRSIGIDRAERYAKWSTVKNPYGAPSYSLPYGFVQSPILASLVLLKSSVGDYLRGLPGHITKSIYMDDIVLSGQTLDTVTIAFDGLLAVLEQSNFQINEEKTRVPAPAMDVFNCDLAFGETAVREDRKLEFYETVSSAASAAAFERYCMTVEQGNLLPRIDQQ

SEQ ID NO: 1241 - protein, 279 aa, unidentified
  source 1..279: note = uncultivated organism;MG160-252 reverse transcriptase
MAPQEYTLCQLANNLGFTTVQTLQAFAKKAPSCYGRVVIPKDKQNPTKGLREINPPTEELKQIQRLLLEKVLYHINTLDNMGAGRGSSTAKIMALHTKKDMMLCYDISNFFPSVKKWTIKRCLRDRGFPWDVIDVIANLTTFNNHLPQGGPCSTQLGKIIISPPAKHLLRLLKNYGTAVDVSFWVDDIIISGPRSLKNLEKSDNVYNIFSRYGFQLKREKTKIQPKTDEQNALGLRVDRGIVEPDSEFICSYSTEISLNGCNSKRAKGMRNYMKSVRKK

SEQ ID NO: 1242 - protein, 285 aa, unidentified
  source 1..285: note = uncultivated organism;MG160-253 reverse transcriptase
METIMAPQEYTLCQLANNLGFTTIQTLQAFAKKAPSCYGHVVIPKDKQNPTKGLREINPPTEELKQIQRLLLEKALYHINTLDNMGAGRGSSTAKIMVLHTKKDMMLCYDISNFFPSVKKWTIKRCLRDRGFPWDVIDVIANLTTFNNHLPQGGPCSTQLGKIIISPPAKHLLRLLKNYGTAVDVSFWVDDIIISGPRSLKNLEKSDNVYNIFSRYGFQLKREKTKIQPKTDEQNALGLRVDRGIVEPDSEFICSYSTEISLNGHNSKRAKGMCNYMKSVRKIMR

SEQ ID NO: 1243 - protein, 268 aa, unidentified
  source 1..268: note = uncultivated organism;MG160-254 reverse transcriptase
METIMAPQEYTLCQLANNLGFTTVQTLQAFAKKAPSCYGRVVIPKDKQNPTKGLREINPPTEELKQIQRLLLEKVLYHINTLDNMGAGRGSSTAKIMALHTKKDMMLCYDISNFFPSVKKWTIKRCLRDRGFPWDVIDVVANLTTFNNHLPQGGPCSTQLGKIIISPPAKHLLRLLKNYGTAVDVSFWVDDIIISGPRSLKNLEKSDNVYNIFSRYGFQLKREKTKIQPKTDEQNALGLRVDRGIVEPDSEFICSYSTEISLNGRNSR

SEQ ID NO: 1244 - protein, 252 aa, unidentified
  source 1..252: note = uncultivated organism;MG160-255 reverse transcriptase
MARSFEKFYEIKEGRFVFEPTTKARKIGEEILNDLFKIWSPPDHFYHLGKSKGHVEALRVYSKSRLFASIDIENFFGSVTRTKISRSLRAIGIDDKKGFSIAYDSVVDFGGTKTLPYDFIQSVALATLVMEFSALGNAIRQAIKSNVMITVYVDDIILSGEHAETLQHHFDEFVRTTNAAKFNISAKKCQNVSDKIEVFNCNLSKSHISTNPKRMAQFKVDYAHASDARRASIEKYITAVNKSQVAELGRLH

SEQ ID NO: 1245 - protein, 251 aa, unidentified
  source 1..251: note = uncultivated organism;MG160-256 reverse transcriptase
MKNYFRKIPLGDGKFAYEQTPEARKEGENLVKQVFKRWDAPSFFFHMKAGGHVAALASHKKNCYFTKLDISRFYYNVTRAKLVRSLQKIGVPFEAAMYYAQISLVCDRGHRFLPYGFHQSPALSALVLDKSLAGRYLREAARKFTLSVYVDDIILSSRNSEALAKSSDQLVQALHGSNFSINESKSKICSASCISFNVLIQENSTEITDQRLDQFKTQISEVNGKESVVQGILQYVHSISPEQAKGLAREV

SEQ ID NO: 1246 - protein, 255 aa, unidentified
  source 1..255: note = uncultivated organism;MG160-257 reverse transcriptase
MEQNYEYYFELAPGKFVFLPTAKCKAEGKKIIKRLRKVWTPDRYFYHFGKKGGHVAALRPHVKSNYFARIDLANFFPSISRTRLHRSLKSQGFSNRAALDIAAASCVEKDGRKFIPYGFVQSMAMATLSVEKSLLGRKIKEFRDTGATITMYVDDIIISSNKYMQAEHIYNELMASALECGLQISDQKTSRPKESVGAFNCDVSHSLIAINEERMQKFREQLSQANEKQRMAILRYASVINPAQAHELAQVRSHI

SEQ ID NO: 1247 - protein, 244 aa, unidentified
  source 1..244: note = uncultivated organism;MG160-258 reverse transcriptase
MAVKYQNFTHSFNLNGKPVFAPTEVGYRIGRDIKKLVETSYNFEDFYYHLRCGGHVAALHGHRENAYFCKVDIENFFYSIPRNRVIRCLKSIGISRHSHYAKWSCVKNPFTPPSYALPYGFVQSPILASLVLSRSELGEFLRDATKEFNVAVYVDDISLSGNDLSALNDAYLRLNDAADRAMLKLNPTKSVKPSEFLEVFNCSLETGKAEVTHSRIADFYKYGHPPSSVRAFEGYCSSVSKGNR

SEQ ID NO: 1248 - protein, 273 aa, unidentified
  source 1..273: note = uncultivated organism;MG160-259 reverse transcriptase
METILNKLTVETLAKRLELPSYILLELAENAPNLYSEHSIPKNNSGTRILEIPYPILKNFQKKLLDKILHKIPTHPKLFGRPGTSIKDAVANHVKKSMVVQMDIKNFFPNTKSHKIKKAFIMNGGSQEIANILTRLVTYKNHLPQGAPTSSCIGRIILKPFAEQLERLLIRIPKSSFSVYVDDIIISGPDGLKRIKNTIFKILKRHGFEINKSKIYIMNRKGEQISLNIKLNNGIEATKKFLREIEELSTQLPPSNPTLKGKKAFVEFLLREK

SEQ ID NO: 1249 - protein, 259 aa, unidentified
  source 1..259: note = uncultivated organism;MG160-260 reverse transcriptase
MKNYVSKIPLGDGKFAFHQDPTFQRLGLDLTEKILQNWKAPNIFYHMRNGGHIAALHKHLEGQYFSHFDIRRFFYQITKNKIIRSLKRIGFSYDKAIDAASHSVVHVDNTYFLPYGFTQSPILASLCLFHSGAGRYLMRLPKTVLVSVYVDDIILSATSKDELSQVSEEAAQWFEASQFPFAPDKTEVCQSAITSFNVELSHGHTQITDDRMRAFKRQVTENIYNKGSLQGIQNYISSINTEQSDEISAYIEGLFKGQA

SEQ ID NO: 1250 - protein, 245 aa, unidentified
  source 1..245: note = uncultivated organism;MG160-261 reverse transcriptase
MSVKFPTYNYSFEVSGKRIYFQSKWARKKGEEIKNLVENAYNFEDYFYHLKKGGHISAIHSHRQFRFFCKLDIENFFYSINRNRVQKKLKKLKIPNSQFYSKVSCIKDPNYSNYVLPIGFKQSPVLSSLVLAKSTIGDTLYEMKDQNVCNISVYVDDICLSSNNLKTLQECYNELKNKIEESNFSINKNKSREPCEEIEIFNCSLKYEKTLVLPNRITYFNNRNTNPASKIGFDNYCSSVEIGNR

SEQ ID NO: 1251 - protein, 245 aa, unidentified
  source 1..245: note = uncultivated organism;MG160-262 reverse transcriptase
MSVKFPTYNYSFEVSGKRIYFQSKWARKKGEEIKNLVENAYNFEDYFYHLKKGGHISAIHSHRQFRFFCKLDIENFFYSINRNRVQKKLKKLKIPNSQFYSKVSCIKDPNYSNYVLPIGFKQSPVLSSLVLAKSTIGDTLYEMKDQNVCNISVYVDDICLSSNNLKTLQECYNELKNKIEESNFSINKNKSREPCEEIEIFNCSLKYEKTLVLPNRITYFNNRNTNPARKIGFDNYCSSVEIGNR

SEQ ID NO: 1252 - protein, 256 aa, unidentified
  source 1..256: note = uncultivated organism;MG160-263 reverse transcriptase
MPKNARWSSKFEIKSGSWVFVPTDETVEYGQNVKKAIEDRWLPPSFYYHLRDGGHVQALSSHTNNDFFIHLDISNFFGCINKSRVTRCLKGLYSYNQAREIAVESTVRDPNNPGIEKYILPFGFVQSPIIASLCLQQSRLGRYLSDLNNMDAYKVSVYMDDIVVSSNSDAGLSNVLREVKPIAEKAGFPLNEAKEEGPAGKITAFNIELSKGVLTLTEERLQDFIAAYRESDNFNVISGIVGYVTTVNKGQAAKIV

SEQ ID NO: 1253 - protein, 239 aa, unidentified
  source 1..239: note = uncultivated organism;MG160-264 reverse transcriptase
MENYDSRIPFGNGKFAYVQKEEFRTQALEHMNRIRGLWSPPSFYFHLQPGGHLAALRSHIGNRYFGRVDLERFFENVTKNRLIRTLKRIGYSFADSREFASASTVRVRGAGPRRFALPYGFVQSPLLASVALDRSALGSCLSRLDRSRSRVSVYVDDIVVSSIKREGVISAMDLIRRAADQSGFPVNKEKVIEFTQEITVFNIIFDGIKMEIKEERFEEMSQDIAQEGPGASSMGFGAM

SEQ ID NO: 1254 - protein, 280 aa, unidentified
  source 1..280: note = uncultivated organism;MG160-265 reverse transcriptase
MAIEFENFLYSYSKKGKRIFVPNRFSCNLGKKLKRKIAKKYRFDSFVYHFRKGSHIAALHRHRKNKFFCRLDINRFFYSIRRNRIKRALKQIGIEKPEYFAKWSTVRNPYEGGGYVLPYGFVQSPVLATLVLALSPIGAYLRGLPKTITCSVYMDDLCLSGPNLAELKAAFDGLVAAVEQAGFTLNDKKTREPAEQIDIFNCSLANDSTAVLQDRVDEFYANERSEAAVDAFETYCDIVQSKTWRHGPSKKKRNKVYTERRKKAAPTTPLPEEEPREIAS

SEQ ID NO: 1255 - protein, 277 aa, unidentified
  source 1..277: note = uncultivated organism;MG160-266 reverse transcriptase
MTAADRISYLLDRYPVDTSVQRWHRAKLGGGQRSIVTPNDALKRWLRLMNAALIRQFNDWPSFMHGGIKKRGYVTHARQHVARPCVITIDIKSCFDSITEREVADAMQRHLGLDDDVCARLANVLCFRGAVAQGFPTSNYICNLYLLDPLSSMHSRLSVRHIRLSNYVDDIAVSGAIVAPGELVNEIALNLSRAKLSMNKAKVSVMPSSKRQVVCGLVVNKRLSLTSTLKLKLLGDVAHGRMSPASVAGWIANLKSIDPVFGTKLHQLAMRKGLLKS

SEQ ID NO: 1256 - protein, 252 aa, unidentified
  source 1..252: note = uncultivated organism;MG160-267 reverse transcriptase
MARSFEKFYEIKEGRFVFEPTTKARKIGEEILYDLFKIWSPPDHFYQLGKSKGHVEALRVYSKGRLFASIDIENFFGSVTRTKISRSLRAIGIDDKKAFSIAYDSVVDFGGTKTLPYGFIQSVALATLVMECSALGSAIRQAIKSNVMITVYVDDITLSGEHAETLQHHFDEFVRTTNAAKFNISAKKCQNMSDKIEVFNCNLSKSHISTTPKRMAQFKVDYAHASDARRASIEKYITAVNKSQVAELGRLH

SEQ ID NO: 1257 - protein, 260 aa, unidentified
  source 1..260: note = uncultivated organism;MG160-268 reverse transcriptase
MSEQRWLHKFELKQNCWVFVPNDESRINGLIIKKRIEEKWKPPDYYAHLRKGGHIYAVKKHLGNDLFFCADISQFFNRINLSRVTRELKSIFKDYTESRYIACESVVQLPNSKERKYILPFGFIQSAIIASLCLNNSALGKYLNQLASNGFRVSVYMDDIIVSTSLPLAQAETAFDVLHKKAVRSGFNLNTNKTFGPSDTITAFNIHLSKGKIELTDSRLDEFKKAIIEADNSTVIDGILRYVDSVCPKQVPILQAACLL

SEQ ID NO: 1258 - protein, 276 aa, unidentified
  source 1..276: note = uncultivated organism;MG160-269 reverse transcriptase
MTIPEELEKLLASYPIDADFSRVHQPKKSGGTRLIVAPNEPLRKWLKQVSSTLRRAKKDWPEFIHGGVRKRSYVSFVRPHINKKTVITLDIRKCFPSIKQSFIVHALQSKLELDPDLAKRLASKLCLDGNLPQGFATSNFLTNLYLNDTLLEIRRKLAKEMDFTIYVDDIAISGNSLNAGEIINLICIELSRAKLAVDKKLKIKVMHSNRRQVVVGLVLNKGISLSREKRLWIFSQVATKQMSQETLDGWRANINMFDKPLLKKLETYASKKGYRI

SEQ ID NO: 1259 - protein, 245 aa, unidentified
  source 1..245: note = uncultivated organism;MG160-270 reverse transcriptase
MSVAIPNFTYNYLRKGKPVFVPTKIGRRIGTEIKEAVEGAYAFGPIYFHLRRGGHVAAMHHHREKNTFARIDISNFFYSISRRRVQSALDRIGVGNACFYAKWSTVLSPFGNPRYALPYGFVQSPILASLVIATSDLGQHLLKLPASVKAGVYVDDISLSSDDADELQRAYNATLAVIAADGFAVNPGKLRPPAPAIDIFNCDLSHGKASVTDDRINAFLATNPSQAAEDAFVAYCASVEMGNQP

SEQ ID NO: 1260 - protein, 249 aa, unidentified
  source 1..249: note = uncultivated organism;MG160-271 reverse transcriptase
MDLGLKNYEYSYRNAKGKPVFAPSAEGREIGRKVKELVSEAVEFDSIYYHLKPGAHVSALHAHRDNTWFSRIDLKNYFYSISRNRINRELRGIGVRHHERFSKWSTVRNPYETPSYSLPYGFVQSPILATLAFQNSAVGTLLRDMPAEVTVSVYLDDIGLSSSNPDLLRKAHHATLRAVEESNFVVNMDKTAAPSDQMVLFNCDLTHASANVRAERIDEFFSTERSEPSASAFLAYCEAVSAGNLTLDG

SEQ ID NO: 1261 - protein, 252 aa, unidentified
  source 1..252: note = uncultivated organism;MG160-272 reverse transcriptase
MPKKWETRFELKPGTWVFVPTEEARELGYVIKELVGARWRPPKNYFHLTNGGHVHAIAAHVHNTSFAHLDIQDFFGQINASKVTRWLKPLVGFSKAREFAKASTVAHPRDGGTMLPFGFVQSPILASLCLFHSALGRCLFELPRKLGVVVSVYVDDIILSAEDESILAQAVKLVDESAVRSGLPIHPDKREGPAQNITAFNIDLAHQFLRIEEERWNSFLNDYQAATSEYVREGILSYVRSVNSDQANILGT

SEQ ID NO: 1262 - protein, 251 aa, unidentified
  source 1..251: note = uncultivated organism;MG160-273 reverse transcriptase
MSHNYKYRFELRPGKHVYVPTPEAIAYGEAIVADVRKHWQPANYFYHFGKMGGHVAAMRPHVSRRYKASIDLKNFFGNVTRSKVSRSLVSIGKPSKEAFSIATESCVVDGQSKFLPYGFVQSMALATLAVENSSLGRCIANCRASGLIVTMYVDDILMSSDDLKIISSAYEDIIASIESSNFSVSASKCSPPSSSVEAFNCIIQKGKIEVSDPRMNAFRDQLIFASEDAREAILRYVSVLNVTQASQLAVS

SEQ ID NO: 1263 - protein, 253 aa, unidentified
  source 1..253: note = uncultivated organism;MG160-274 reverse transcriptase
MLPRNYSYKYERKPDRFVYVQSEKQSLDGSIIALRVARRYKPSPIFFHFRRRGGHLSALKLHLDSSYFARFDIDYFFGRVTRTKVARCLREIGFTRKAAFSMAYDSVVTEGVRKIVPYGFPQSTILSTLVLEKSLLGQVLIAANSSGTKVSVYVDDIIISSDDKNELERTYDGIIAASIASNFPFGVAKTTSASIKVEAFNCHISRGLCGFVDERMNRFVETHADRTELGKEIVERYICEVSPSELLRFKTLL

SEQ ID NO: 1264 - protein, 195 aa, unidentified
  source 1..195: note = uncultivated organism;MG160-275 reverse transcriptase
MKVHVGHSCLASVDLTQFFPSVTRTMVARSLRKLGYPDRKAFNTAMESCVVAGGQKFLPYGFPQSMCLATLVVENSALGSTLKSAVAAGVSVSMFVDDIIISANNDDLVVEYFEKIQVSARDSGFQVSASKVTPPGDEVASFNCRVSDSIELLPQRIERFKEQLQFASDPGKAAILRYVSGLNQQQHDELLAFIA

SEQ ID NO: 1265 - protein, 246 aa, unidentified
  source 1..246: note = uncultivated organism;MG160-276 reverse transcriptase
MFENFKYSYWKNGKPIFAPSERGLAWGEKVKGKVEELYKFDDFVYHFKDGSHVKALHEHRKNSYFCRVDIERFFYSIRRNRLKRLLKDIGIRKAEEFAKWSTVKNPYPEAGYVLPYGFIQSPILATLVLTESAVGGYLRRVNSDGITVSLYMDDICLSSNDAAELGRSFDGLKAAVGEAGFALNGDKTREPAKVIDIFNCSLERGSTEVLPERIDEFYSVYRTVASVEGFETYVDIVKSHTWRAKK

SEQ ID NO: 1266 - protein, 252 aa, unidentified
  source 1..252: note = uncultivated organism;MG160-277 reverse transcriptase
MARSFEKFYEIKEGRFVFEPTTKARKIGEEILNDLFKIWSPPDHFYQLGKSKGHVEALRVYSKGRLFASIDIENFFGSVTRTKICRSLRAIGIDDKKAFSIAYDSVVDFGGTKTLPYGFIQSVALATLVMECSALGSAIRQAIKSNVMITVYVDDIILSGEHAETLQHHFDEFVRTKNAAKFNISAKKCQNVSDKIEVFNCNLSKSHISTTPKRMKQFKVDYAHASDARRASIEKYITAVNKSQVAELGRLH

SEQ ID NO: 1267 - protein, 289 aa, unidentified
  source 1..289: note = uncultivated organism;MG160-278 reverse transcriptase
MRKKHNQDLVLGYIYLAIEALRFGSRVLEFLNVVINYFIFVYLKYKSKFQLKPSVWVFVPTEESVAKGKGFKFAVEKYWKAPINYYHLRQGGHVEALKSHLQNSHFIHLDIQNFFGSINRTRVTRCLKGLFSYTVAREIANYSTVSHPVDKNSILPFGFVQSPIIASLCLDNSALGRYLRMLSKNNDVTVSVYVDDIIISSNDALLLKDVMTNIKISAARAGFDLNEKKEEGPSAKITAFNIELANQSMEITVERMRQLMDSYENTDSENVKKGIAGYIMSVNELQKLS

SEQ ID NO: 1268 - protein, 256 aa, unidentified
  source 1..256: note = uncultivated organism;MG160-279 reverse transcriptase
MHESFESRWISRFEIKPNAWVFVPTSEFIRYGTEIKQTVAKRWHSPRYYYHLRDGGHVSALKKHIKHKHFIHLDIQNFFGQINRSRATRCLKDYFSYSEARKIAIKSTVALPRSAIKKYILPFGFVQSAIIASLCLHKSTLGKHLHQLAKKSDLTVSVYMDDIIISSNNQHQLEEVLVSVEVAAEKAGFPLNKTKQEGPCDQITAFNILLTENELKITDERLDEFIEAYKASTNPNQKDGIFNYINCINSNQVSFL

SEQ ID NO: 1269 - protein, 244 aa, unidentified
  source 1..244: note = uncultivated organism;MG160-280 reverse transcriptase
MPVKFQNFSHSFNIKAKPVFVPSERGYLIGRDIKQQVNERYDFPTFYYHLQSGGHVAALHAHRENRFFCKIDIDSFFYRISRNRVTRALKDIGVARSLHYAKWSCVKSPLAPPAFALPYGFVQSPILASLVLSKSVLGDWLREKSQHLCVAVYVDDISLSGKNLDVLQEAYNELHQMAAASNFPLNLRKSVAPTALLEVFNCTLRLGATTVDAKRITAFHALDPNDASIDAFERYCATVAEGNL

SEQ ID NO: 1270 - protein, 259 aa, unidentified
  source 1..259: note = uncultivated organism;MG160-281 reverse transcriptase
MIAKWESRFELKPNKWVFVPTAETIAVGRKIKKSIKECWKPPSYYYHLRSGGHVSALKSHLKHAAFLHLDVQDFFGSINKTRVTRCLKSKVGYAIAREWANISTVIDPRDKKKYIIPFGFVQSQIVAALCLHESALGACIHTLQKNKKLVVSVYVDDIIVSSDNTDLLSETLEKLQEAAKRAGFALNSKKQEGPSASINAFNIVLSHAQLEINEDRLRQFINALEEAISTPQRLGILNYIATVNNDQAEGLAEFARPNP

SEQ ID NO: 1271 - protein, 274 aa, unidentified
  source 1..274: note = uncultivated organism;MG160-282 reverse transcriptase
MSKLITKSFIERELGLTQAEFATLCDGAPRCYKYEAHPKANGEHRIISKPYSRIKIHQKKLNKALSELPIEAGICGGPGTTIMAAMKPHCKNPLLLTIDLKNFFPSIDQRRVNDLFAQILDDSSYASSFTKLCTTRRAMPQGAPTSATIARLIIEPAFVDLKKALIDMHPSCEVTAWVDDIMISGPLGIRRAKKTIGKVFERHGFTINHDKTKVMFSAQDRTNLGITLKDILEPSAENLAKYEKCLKETSDKEESIRGYINFFKDIAKANQVCA

SEQ ID NO: 1272 - protein, 260 aa, unidentified
  source 1..260: note = uncultivated organism;MG160-283 reverse transcriptase
MPFSSKWVFKYPIKSYSWIFIPTESTIKNGKIIKSIIEKNWVAPNYFYHLKKGGHVKALKIHKENSFFIHLDIQDFFGHINKSRVTRCLKSFLGYERARKIAKESTVNIFKKTSKKTISILPFGFVQSPIIASLCFHKSKLGKYLHNINGKHGVYVSVYMDDIIVSSPNKLNLEKIFYNIEVLSVYSKFPLNIEKKDEPSNQITAFNIHLSHNLLEITDIKLNEFKNKVKDSQNIYEINGIISYISSINKEQAKFFVNNI

SEQ ID NO: 1273 - protein, 260 aa, unidentified
  source 1..260: note = uncultivated organism;MG160-284 reverse transcriptase
MGTSMHRWVSRFELKPERWVFIPTENTIKIGIEIKTAIMERWTPPYNYYHLQKGGHVSSLRDHIDNTYFACLDIENFFGSINKSRVTRCLKTFFSYEVARKFAVASTVVDPNGCDPKKFILPFGFVQSSLVSSVCLYESTLGRKIKQINNRKDSVHVSVYVDDIVISAKSEDLVMSAMIEIKDSADKSRFKLNVDKEFGPSNNVTVFNIKLSNRTLEVEQDRLLQFRQKFKSSSEKNVRSGIIGYINSINSDQAELIQID

SEQ ID NO: 1274 - protein, 256 aa, unidentified
  source 1..256: note = uncultivated organism;MG160-285 reverse transcriptase
MKQKWTTKFELKPGRWVFVPTVESVRVGKEIKSAIEHRWSPPGHFYHLRAGGHVAALNAHLHSSVFLKVDVKDFFGSISRTRVARCLKKRFGHVTALEWAHASTVRSPTDVARSIIPFGFVQSPIVASLCLAESALGSFLRKLARGGQVRVSVYVDDVILSCKDAGALNNALLMKLQRAAGRSRFDLSVEKTQGPAPAIKAFNIELCHGAIRIEDGRMHEFIEALKSSTSAPQRAGILGYIGSVNPDQRMEAEGVV

SEQ ID NO: 1275 - protein, 257 aa, unidentified
  source 1..257: note = uncultivated organism;MG160-286 reverse transcriptase
MKKVSQRWSSKFQIKPGSWVFVPTDEAVKYGNFIKASIEARWSPPNYYYHLRDGGHVKALSSHLEHEFYIHLDISNFFGCINKTRATRSLKRYWSYDAAREMASQSTVRDPNSPQNARYILPFGFVQSPIIASLCLRNSKLGSYLAKINKTAEVTVSVYMDDIIISSNDAQQMVVILADIKPISELSKFPLNPKKEEGPSGVITAFNIKLSKGVLRLTNERLNAFKAAYRKSDNFNVLSGIVGYVSTVNFDQANEIF

SEQ ID NO: 1276 - protein, 286 aa, unidentified
  source 1..286: note = uncultivated organism;MG160-287 reverse transcriptase
MISRFEEIFGVKEGKINRILRNRSYNKYSYRKKSGGIRVLLEPDEDLKELQRELYQNLAVRYPILDGINGVKDTSIFDHIDPHLSKKIILTTDIEDYFTNVGKAYVIRKLEEQGVLNETMRELIACVVTFNNQLPQGAPSSTFMACLTIQPLFRSIMKFSKEKGIDITLYVDDWAISGQNKKGVTEVFNKLESLLSKDGLFVSPEKTKIMTGTKKKIVGVVVGDKMRVNRKYIQEVRDDILTYSKQVPLRQKELMEEVKGKLNFIKSLNDPRAENLIELFKKETLD

SEQ ID NO: 1277 - protein, 281 aa, unidentified
  source 1..281: note = uncultivated organism;MG160-288 reverse transcriptase
MAPQEYTLCQLANNLGFTTVQTLQAFAKKAPSCYGRVVIPKDKQNPTKGLREINPPTEELKQIQRLLLEKVLYHINTLDNMGAGRGSSTAKIMALHTKKDMMLCYDISNFFPSVKKWTIKRCLRDRGFPWDVIDVIANLTTFNNHLPQGGPCSTQLGKIIISPPAKHLLRLLKNYGTAVDVSFWVDDIIISGPRSLKNLEKSDNVYNIFSRYGFQLKREKTKIQPKTDEQNAFGLRVDRGIVEPDSEFICSYSTEISLNGRNSKRAKGMCNYMKSVRKIMR

SEQ ID NO: 1278 - protein, 335 aa, unidentified
  source 1..335: note = uncultivated organism;MG160-289 reverse transcriptase
MRFISQTFRRIKMNHRYCRIIFAGYYTVKFLNELIDLLVKILTLFNYFLPKKQMSFPLWSHRYKSKKGKWIYIPTDECRIKGANIIRLLSTFWHSPSYFYHLQKGGHIAALKLHLYNGSDLRQIKNSRYFSYFDITNFFGSINKNKVIKATKCFVGYQMAKDIANASTVTNIGSSEKVLPFGFVQSPLIGSIVLDQSYLGRELSKLSKLHNLKLSVFVDDIIISSDNKKLIQSASERILKAIEKSNLHLNQEKSSICNGSMKVFNIIAKYNCLYLTEHRLTVFAEKLINNSSDYFVVEGIVNYMKMVSPHQSKRLIKEIVCEIGTSRAGFIAKIP

SEQ ID NO: 1279 - protein, 282 aa, unidentified
  source 1..282: note = uncultivated organism;MG160-290 reverse transcriptase
MSFPLWSHRYKSKKGKWIYIPTDECRIKGANIIRLLSTFWHSPSYFYHLQKGGHVAALKLHLYNGSDLRQIKNSRYFSYFDITNFFGSINKNKVIKATKCFVGYQMAKDIANSSTVTNIGSSEKVLPFGFVQSPLIGSIVLDQSYLGRELSKLSKLHNLKLSVFVDDIIISSDNKKLIQSASERILKAIEKSNLHLNQEKSAICNGSIKVFNIIAKYNCLYLTEHRLTVFAEKLINNSSDHFVVEGIVNYMKRVSPHQSKRLIKEIVCEIGTSRAGFIAKIP

SEQ ID NO: 1280 - protein, 267 aa, unidentified
  source 1..267: note = uncultivated organism;MG160-291 reverse transcriptase
MNTEITEEQLAKSLNLSLSELREWISCAHKSYGRMVIIKPNGKKRILYPPTKQLKFIQRKLLRNILSKIPTPQEMCSGKGKSTKDIMQKHVNKNMLIRIDLSDFFPNIKAHKIFTLLRERGFSQKVARIITKLTTFRGSLPQGSPCSPQLACLALAPAAKHIINLFQFPVSITFYVDDIIISGSGSTQNFRETIYNILERNGFVVNRAKTKIMPRGTEQSALGLRVDHGKVEPDSQFMEKYQKARHENANPESIRGMRKYLKYIISK

SEQ ID NO: 1281 - protein, 282 aa, unidentified
  source 1..282: note = uncultivated organism;MG160-292 reverse transcriptase
MSFPLWSHRYKSKKGKWIYIPTDECRINGVNIIRLLATFWHSPSYFYHLQKGGHLAALKLHLYNGSDLRQIKNSRYFSYFDITNFFGSINKNKVIKATKCFVGYQMAKDIANTSTVTNIGSSEKVLPFGFVQSPLIGSIVLDQSYLGHELSKLSKLHNLKLSVFVDDIIISSDNKKLIQSASERILKAIEKSNLHLNQEKSAICNGSIKVFNIIAKYNCLYLTEHRLTVFAEKLINNSSDHFVVEGIVNYMKRVSPQQSKRLIKEIVCEIGTSRAGLIAKIP

SEQ ID NO: 1282 - protein, 279 aa, unidentified
  source 1..279: note = uncultivated organism;MG160-293 reverse transcriptase
MGNTKELEKLLTEYPADAGVFCTTEPKRDDTSRPIVKPNKSLNKWLKSVKCALYRQCSDWPTFIHGGIKKRSYVSFARPHANKNTVIAIDIRNCFGSITQREVQQALSDKLGLSSGLASRLAVKLCYRNRIPQGFATSSYLTNLYLNDTLLQINQLLRHKRVDMTIYVDDIALSSQQVNAAEVINLVAVQLSRAGLAVSKAKIKVMHAHAPQIICGLLVNKGVTLTRQKRKEIFSDVANGRMTKTSLEGWLANLNMIDKRLMRKLQAYAIQKGIIRAGA

SEQ ID NO: 1283 - protein, 279 aa, unidentified
  source 1..279: note = uncultivated organism;MG160-294 reverse transcriptase
MGNTKELEKLLAEYPTDASVFCTTKPKRDGTSRPIVKPNKSLNKWLKSVKRVLYRQYSGWPTFIHGGVKKRSYVSFARPHANKNTVIAIDIRDCFGSITQREVQRALIDKLGLSSGLASRLAVKLCYRHRIPQGFATSSYLANLYLNDTLLQVNRLLRRERVDMTIYVDDIALSGQQVNAAEVINLITIQLSRAGLAVSKAKIKVMHAHAPQIICGLLVNKGVALTRQKQKEIFSDVANGRMTETSLEGWLANLNMIDKRLMRKLQAYAIQKGIIRADT

SEQ ID NO: 1284 - protein, 267 aa, unidentified
  source 1..267: note = uncultivated organism;MG160-295 reverse transcriptase
MNTEITEEQLAKSLNLSLSELREWISCAHKSYGRMVIIKPNGKKRILYPPTKQLKFIQKKLLRNILSKILTPQEMCSGKGKSTKDIMQKHVNKNMLIRIDLSDFFQNIKAHKIFTLLRERGFSQKVARIITKLTTFRGSLPQGSPCSPQLACLALAPAAKHIINLFQFPVSITFYVDDIIISGSGSIQNFRETIYDILERNGFVVNRAKTKIMPRGIEQSALGLRVDHGKVEPDSQFMEKYQKARHENANPESIQGMRKYLKYIISK

SEQ ID NO: 1285 - protein, 255 aa, unidentified
  source 1..255: note = uncultivated organism;MG160-296 reverse transcriptase
MPSLWSNKFEIKPGYWVFEPSEECRVIGGDLKNKIFGKWKPPDYYFHFQDGGHVAAAKSHFGNVFFLKIDISKFFCSINRSRITRNLKEFFGYADARDYAVKSTVRDPNNKNKFFLPYGYVQSLCLASLALSKSQLGVELNKIRRSNGCAISVYVDDIIISSKNIDLLYGIKDVVIESARKSKFFINENKTEGPSTLITAFNLDISYNSVKINQTRFYELLDNHRDSDLIAQKEGIEGYVRSVDLNQYQLFMSLI

SEQ ID NO: 1286 - protein, 290 aa, unidentified
  source 1..290: note = uncultivated organism;MG160-297 reverse transcriptase
MRLFRFIGKIMIPQEYTLYQLADYLNFSSVQALQTFSKQASSRYGYVVIPKDKQNPNKGSRVINPPDKELKKIQRLLLKKVLSQIVTPSNMGAGQGSSTAQIMALHTGKDLLLCYDISNFFPSVKKRMIKQCLRDRGFLWGVVDVIANLTTFKDHLPQGAPCSTQLGKMVISSPAKHLLQLLENYGTSIDVSFWVDDIIISGPTSLRNLEKSGNVYDIFSRFGFILKKEKTKILPKTSEQNALGLRVDRGIVEPDSMFMFSYSTEISHNGYNSTKARGMRSYMRSINRRK

SEQ ID NO: 1287 - protein, 257 aa, unidentified
  source 1..257: note = uncultivated organism;MG160-298 reverse transcriptase
MSLDVLRWEHKFELKPGIWIYVPSTDGIKCGEKILREVRSKWIAPLYFYHLRTGGHLKAARLHLKSDFLAVVDIKQFFQSTSRSRITRVLKNYFTYSQAKEISKLSTVRNLTGTPHQHVLPFGFVQSPILATLCLDKSHLGGLLRRLSKHPDMKLSVYMDDLIISSNDFVQLQTAYDEILAAMEKSGYQANMIKTQAPSSLIKVFNLNVSKGAMKVTSQKMSDFLIDFYASDYEPHKIGVKNYVESVNPEQAKLLKL

SEQ ID NO: 1288 - protein, 245 aa, unidentified
  source 1..245: note = uncultivated organism;MG160-299 reverse transcriptase
MIENYKCKFKFHGKFIFVPSLICDKKAKRLLAFGASIELPNYFFHYRPGGHVDALHRHLESRHFFRIDLKNFFYSIGRNRISRLLRQHHFPGNARTYAEWSTVRNPYPDGPRYALPIGFRQSPLLASLVLYDSALASAIEDAYARGVFVSIYFDDLIGSSNEIKELQVTYDGILAACVQANLIANPDKLVSPADAIVAFNCDLTHGRAQVTDARIQRFVDEHRGAQAEEAFLAYCERVERRNHPA

SEQ ID NO: 1289 - protein, 242 aa, unidentified
  source 1..242: note = uncultivated organism;MG160-300 reverse transcriptase
MLENYKFKFRARGKFIFVPNERCVRKGERIMAFVKKRAKLPDYFYHYQPGGHVAALHSHVPHTLFFKIDIQNFFYSITRERVTRALREYGLQGAHTFARWSCVANPMPGPQFVLPIGFVQSPLLASLVLMRSPVAIAIERAKDSGVTISVYLDDIVGSHSDLGTLTAAYEDIRQACATSNLIPNPDKLVSPAAAIVVFNCDLTHGRALVTEDRLAEFLAVPHTDASRQAFDQYRNRVAAAHG

SEQ ID NO: 1290 - protein, 244 aa, unidentified
  source 1..244: note = uncultivated organism;MG160-301 reverse transcriptase
MIENYQFKYRSRGKWFFVPNDKCERRGRRMLAYFKRRVAFPDYMYHFKKGGHVAALHAHLNNHFFFKIDIQNFYYSIARMRVTRALRQWGYPGANTFAMWSCVRNPLPGPKHALPIGFVQSPLLASLALMKSEVADAIERAMAKGVCISVYLDDFIGSHDDEALLTAAYEDIRDTCVAAGFIPNPSKLVSPQAAITAFNCDLTNGSAEVTAARVAKYFSRPDRTPLSDVGFDEYRDLVRSQNTP

SEQ ID NO: 1291 - protein, 240 aa, unidentified
  source 1..240: note = uncultivated organism;MG160-302 reverse transcriptase
MFENYRAKFQHRNKFIFVPNDEANRRGEIILRFVERTVNFPDNFYHYKSGGHVAAIHGHLAHSYFFKIDLERFFYSISRSRVSATLRHFRFGDARDFAKWSCVRNPYQEGGYALPIGFVQSPALATLTLMKSPLLPAIAEAERQRTFTSVYLDDIICSGNDSSVLTSIYHSFLEAIERASLRAHKLAQPSPNIRAFNCDIRAGYAAVSAERIEKFHREGRGAAAEIAFERYCENVSGMNR

SEQ ID NO: 1292 - protein, 201 aa, unidentified
  source 1..201: note = uncultivated organism;MG160-303 reverse transcriptase
MEALKSHLNSSSFVHLDIQNFFGSINKTRVTRCLKGLFSYVEARAIANASTVIHPDEQKLILPFGFVQSPILASLCLAKSALGRCIHELPTKYGDLVVSVYVDDIILSCNDEANLHLATAEVKQCAKRSGFELNPKKEEGPAQKITAFNIELSSLSLEVEPARYAEFFFAFAESTSLSQREGIQGYINTVNLLQAESLGPA

SEQ ID NO: 1293 - protein, 218 aa, unidentified
  source 1..218: note = uncultivated organism;MG160-304 reverse transcriptase
MIQYLERRVKFPEYFYHYKSGGHVAALHAHLQNTFFFKIDVQNFYYSIARMRVTRALRSWGYPGAGTLSKWSCVANPIAAHPQYVLPIGFVQSPILASIVLMKSDVSKAIERAMANGVLVSVYFDDFVGSHIDEGVLRAAYIDILDTCVSAKLVPNPAKLVPPNAAIKVFNCDLTHGSANVAAERIGKYMTSAKRSPASDVAFEQYRVLISSANITLS

SEQ ID NO: 1294 - protein, 247 aa, unidentified
  source 1..247: note = uncultivated organism;MG160-305 reverse transcriptase
MIENYKHKYRSRGKFIFVPNERCERRGRRMLKFFSKLDFPAYFYHYKKGGHVAALHAHIENALFFKIDIQNFYYSIARMRVTRALRHWGYPGAGTFSKWSCVFNPIASVPRHVLPIGFVQSPLLATLVLMKSTVVEAIERAIANGVCISVYLDDFIGSHNDEEILKVAYQDIHDTCVSAGLVPNPAKLEPPSVAITAFNCELTHRMARLTEERTTKYQSRPDRTATTDAAFEQYRLLVASENALTSE

SEQ ID NO: 1295 - protein, 251 aa, unidentified
  source 1..251: note = uncultivated organism;MG160-306 reverse transcriptase
MLDTYSHKFRTPRGLLVYVPTVFGAGEGRSIVRKVQGRWTSPRHFFHFRDGGHVAACRYHVRQQFFAHMDIKAFFNSVTRSKVHRALRRIGFNQRDAVGISELSTVEDITTPGRYALPFGFIQSMILATAALDRSRLGKELRRARRYRVRISVYVDDIVLSGSNVADLAGYMAVLNEAADEAGYSFNKSKASGPAGATKAFNVLLSSNDMRISPDRMVEFELALATETEEVRIAVLNYIRTVNRGQADALL

SEQ ID NO: 1296 - protein, 244 aa, unidentified
  source 1..244: note = uncultivated organism;MG160-307 reverse transcriptase
MIENYQFKYQSRGKWFFVPNEKCERRGRRMLAYFKRRVAFPDYMYHFKKGGHVAALHTHLDNNFFFKIDIQNFYYSIARMRVTRALRQWRYPGANTFAMWSCVRNPLPGPKHALPIGFVQSPLLASLALMKSEVADAIERARAKGVCISVYLDDFIGSHDDEALLTAAYEDIRDTCVSAGFIPNPGKLVSPQAAITAFNCDLTNGSAEVTAARVAKYLSRPDRTPLSDAGFGEYQDLVRSQNMP

SEQ ID NO: 1297 - protein, 274 aa, unidentified
  source 1..274: note = uncultivated organism;MG160-308 reverse transcriptase
MEKFKLPSNVTELAKVLGLTENDLQKLAHAAPNLYHTKCVPKPRGGFRIINPPLKHLKEIQGKILRVILNQIPVHQTLHSGPKTSTKSAAKAHVKQPVVIALDIQDFFPSVQSKTVCRAFEANGFSEDVASLLARLTTHKGKLPQGAPTSPAIARIVLCDVCKEFEALLNSISPHARTTIYVDDVTISGPVGLERLIPAIISIFKRHGYSVNPLKKKIMRQNEEQIVLGLRVNCRVEPSSEFEATLKLERQKLHPRDPKLKGLEAYKNYITRGD

SEQ ID NO: 1298 - protein, 245 aa, unidentified
  source 1..245: note = uncultivated organism;MG160-309 reverse transcriptase
MLENYECKFQTRGKIIFVPNERSVRKGRRILKFFSKFEFPDYFYHYKSGGHVAALHAHLENKLFFKIDIQNFYYSIARMRVTRALRSWGYPGANTLAKWSCVANPYPGPRHVLPIGFVQSPLLASLVLLKSPVAEAIERAIKNGVCISVYLDDFVGSHNDPAVLEAAYDDIRDTCVAARLVPNPAKLIAPRAAITAFNCDLTEGSVLVTTERVAKYYASTARTVETDAAFEEYRKLIASTNKAAI

SEQ ID NO: 1299 - protein, 240 aa, unidentified
  source 1..240: note = uncultivated organism;MG160-310 reverse transcriptase
MFENYRAKFQHRNKFIFVPNDEANRRGEIILRFVERTVNFPDNFYHYKSGGHVAAIHGHLAHSYFFKIDLERFFYSISRSRVSATLRHFRFGDARDFAKWSCVRNPYQEGGYALPIGFVQSPALATLTLMKSPLLPAIAEAERQRTFTSVYLDDIICSGNDSSVLTSIYHSFLEAIERASLRAHKLAQPSPNIRAFNCDIRAGYAAVTAERIEKFHREGRGAAAEIAFERYCENVSGMNR

SEQ ID NO: 1300 - protein, 229 aa, unidentified
  source 1..229: note = uncultivated organism;MG160-311 reverse transcriptase
MIEAPFPPLKAAQSKLRVTVLDNIPVHSDLHGVRGTSQITAAAVHRSQAVVITMDIKDFFPSVTSTMVKEALASHSVDSSVADVICRLTTRKKRLPQGAPTSPVLARIVITPAVERLRGLLASISPACKISVYVDDISLSGPMGLQRAIPTVTKILREHGFEFSEKKTKIRKGDEDKEVLGLRVSCRLEPGAAFRKKLEVARQSLPSTSPKLKGLESWVQTVSRANRNS

SEQ ID NO: 1301 - protein, 274 aa, unidentified
  source 1..274: note = uncultivated organism;MG160-312 reverse transcriptase
MEKFAAPGSVVELARILELDERGLRSLADAAPNLYHTKRVPKKSGGFRIINPPLKHLKDVQKRILRKVLNPIPIHKMLHSGPETSTKSAAKAHVNQPVVIALDIQDFFPSVHSKTICHALEANGFPEDVACLLTRLMIHKKRLPQGAPTSPAIARIVLCNICHQFQALLNSVSPHARATIYVDDITISGPPGLEKLIPTIISIFRRNGYSVNPSKKKVMTQNEEQIVLGLRVNRRVEPSSEFEATLKSERQKRQPKDPKLKGLESYKSYITRRD

SEQ ID NO: 1302 - protein, 245 aa, unidentified
  source 1..245: note = uncultivated organism;MG160-313 reverse transcriptase
MIENYKYKYRSRGKIIFVPNERCERRGKRMLKFFSKRVDFPDYFYHYKSGGHVAAIHAHIDNSLFFKIDVQNFYNSIARMRVTRALRAWGYPGAGTFSKWSCVANPINAAPRHVLPIGFVQSPLLASLVLMKSDVSGAIERAIANGVVITVYLDDFIGSHDDMATLTHAYTDIREACVAAGLLPNPTKLVPPSVAITAFNCDLTYGSAIVRADRVAKYMASPNRTVLSDAAFEQYRNLVARENTS

SEQ ID NO: 1303 - protein, 245 aa, unidentified
  source 1..245: note = uncultivated organism;MG160-314 reverse transcriptase
MVLAFENFRYSGKTPKGKPYFVPTDRCRDVGSELMELVRARIKFEHHYYHFSKGAHVAALHSLREHRYFAHIDLKNFFYSVGRNRVKAALKAIGVPRAEHYAKWSTVRNPFGEPRYALPYGFPQSPLLASLVLRGSALGTAIQRLPPEIHRSVYLDDIAISANDMNVLYEAFSSLIASVEAANFVLNDEKASGPAPEVRIFNCDLANGKSTVTASRIAEFYAEDGSDESVAGFERYRESVAAGNL

SEQ ID NO: 1304 - protein, 274 aa, unidentified
  source 1..274: note = uncultivated organism;MG160-315 reverse transcriptase
MSSADRIISLLENYPEDSRAFRSVELKPNGKPRLIAKPNKPLRKWLRSMNKELGSYFGDWPTFMHGGIKKRSYITCARQHVNKRCVVTIDIKDCFDSITEQQITAVLQSKLNLEPETSKKLAHMVSFRSRLAQGFPTSNFICNLYLLDALSKLNEYFKKQNLSFGNYVDDIVVSGKVKHPDKVINEVAKELSRIGLKMNKVKVKVMPSHKQQTVCKLLVNKRLSLTKGLKRELHSQLAKGEMTEASLAGWLANLRTIDPMFAEKLQNFALKKLT

SEQ ID NO: 1305 - protein, 243 aa, unidentified
  source 1..243: note = uncultivated organism;MG160-316 reverse transcriptase
MIENYAFKYRSRGKWIYKPKKGCDRRGQQVIAFIECCVKFPEYFYHFRSGGHVAALHEHLKNRFFFKIDIQNVFYSIARNRVHRALAKCGMRGAPTFAVWSTVRSPYPRGPKYVLPIGFRQSPHIASLVLMHSPVVTTIEDERAKGVLISVYLDDIIGSSEDEEALKAAYDAIKVACVTANLTPNPAKLVEPNPKVVAFNCDLTNGAAEVTVERIAKFYAKFPSIRSRVSFEAYVARVASENA

SEQ ID NO: 1306 - protein, 242 aa, unidentified
  source 1..242: note = uncultivated organism;MG160-317 reverse transcriptase
MLENYKFKFRARGKFIFVPNERCVRKGERILAFIKKRAKLPDYFYHYQPGGHVAALHSHVPHTLFFKIDIQNFFYSITRERVTRALREYGLQGAHTFARWSCVANPLPGPQFVLPIGFVQSPLLASLVLMRSPVADAIERAKSLGVTISVYLDDIVGSHNDLGVLTAAYDDIRQACATSNLIPNPGKLVSPAAAIVVFNCDLTHGHALVTVDRLAEFLAVPHTDASRQAFDQYRSRVAAANG

SEQ ID NO: 1307 - protein, 242 aa, unidentified
  source 1..242: note = uncultivated organism;MG160-318 reverse transcriptase
MIENYKFKYRSRGKYIFVPTEGCERRGRRIISFLYRRVDFPDYFYHYKPGGHIAALHAHLPNRFFFKIDIQNFYYSIARMRVTRALRSWGYSGAGTLAKWSCVINPLAGPRYVLPIGFVQSPLLASLVLMKSPVSQAIERAIANGVCVSVYLDDFIGSHNDRNVLEVAYDDIRETCAAAGLLPNPGKLIAPSEAITAFNCELKYGSAEVTDDRVGKFLDGARSELSRAAFQNYRQRVASRNF

SEQ ID NO: 1308 - protein, 273 aa, unidentified
  source 1..273: note = uncultivated organism;MG160-319 reverse transcriptase
MTACAKMSVTELSCMIGMPEDVLRRLAGKAPHLYRCWDEPKKDGSKRRIEAPFPKLKEVQHLLVDRLLGELPVNTSLHGRPGTSQISAARLHVARQTLTTMDLKNFFPSITSRHVQKALGAHGFTADVAELICRLCTRKKRLPQGAPTSPVLARLVISPSLERIRGAVTKASPHARVTQYVDDLAISGPDGIERLAGLAKKIFAQARLSVNPKKTRIMRGSEAKEVLGLKVNKRLEVSDKFAAELTEARRTMAPSDRRLLGKLAWKRRVERSN

SEQ ID NO: 1309 - protein, 244 aa, unidentified
  source 1..244: note = uncultivated organism;MG160-320 reverse transcriptase
MIENYEFKYRSRGKWIYKPKKGCDRRGQQVIDFIERCVKFPEYFYHFRSGGHVAALHEHLKNKFFFKIDIKNFFYSIARNRVHRALAECGMRGAPTFAVWSTVRSPYPHGPKYVLPIGFRQSPHIASLVLMCSPVVAAIEDQQAKGALISVYLDDIIGSSDDEGALKAAYEAIKVACVAANLMPNPDKLVDPKPKIAAFNCNLTHGAAVVTEERIAKFYTQFPSVTSRISFEAYVARVASENIA

SEQ ID NO: 1310 - protein, 288 aa, unidentified
  source 1..288: note = uncultivated organism;MG160-321 reverse transcriptase
MLRVYIEKVNPINQLLDLLQHYPPDGTVRRESITKPDGSFRYLAKPNKALGLWLRQMNAALNACYDVWPTYIHGGRKKHGYVSYARPHVGKSCVVTIDIKKCFDSITMQQIADALEKHLQLSAKDAKRLAHCVCFRGILAQGFSTSNFICNLVLLDALATMNDRLEPRQIDLTNYVDDLALSGDIAKPDEVINQITLALSRAGLSVKKAKIHVMPANKRQIICGLIVNKRLTVSKEKKQELVTAARTGSMSKASIGGWVANLNSVDPTFSNKLRDCAAKVLPEKSDRS

SEQ ID NO: 1311 - protein, 244 aa, unidentified
  source 1..244: note = uncultivated organism;MG160-322 reverse transcriptase
MIENYQFKYRSRGKWFFVPNEKCERRGRRMLAYFKRRVVFPDYMYHFKKGGHVAALHAHLNNHIFFKIDIQNFYYSIARMRVTRALRQWGYPGANTFAVWSCVRNPLPGPKHALPIGFVQSPLLASLALMKSEVADAIERARAKGICISVYLDDFIGSHDNEALLTAAYEDIRDTCVAAGFIPNPGKLVSPQAAITAFNCDLTNGSAEVTAARVAIYFERPDRTPLSDVGFDEYRDLVRSQNTP

SEQ ID NO: 1312 - protein, 242 aa, unidentified
  source 1..242: note = uncultivated organism;MG160-323 reverse transcriptase
MLENYKFKFRARGKIIFVPNERCVRKGERIMAFVKKRAKLPDYFYHYQPGGHVGALHSHVPHTLFFKIDIQNFFYSITRERVTRSLREYGLQGAHTFARWSCVANPMPGPQFVLPIGFVQSPLLASLVLMRSPVADAIERAKDSGVTISDYLDDIVGSHSDLGTLTAVYEDIRQACATSNLIPNPDKLVSPAAAIVVFNCDLTHGRALVTEDRLAEFLAVPHTDASRQAFDQYRSRVAAANG

SEQ ID NO: 1313 - protein, 242 aa, unidentified
  source 1..242: note = uncultivated organism;MG160-324 reverse transcriptase
MLENYKFKFRSRGKFIFVPNERCVRKGERIMAFVAKRAKLPDYFYHYQPGGHVAALHSHVPHTLFFKIDIQNFFYSIARMRVARALRDYGLQGAHTFARWSCVSNPLSGPKFVLPIGFVQSPLLASLVLMRSPVADAIERAKNSGATISVYLDDIVGSHNDHGTLTAIYDDIRQACVTSNLIPNPNKLVSPTAAIVVFNCNLAHGSALVTEDRLAEFLAAPRTDASRQAFDQYRNRVAAANG

SEQ ID NO: 1314 - protein, 248 aa, unidentified
  source 1..248: note = uncultivated organism;MG160-325 reverse transcriptase
MPVQFQNYEYSYLRGDKPVFAPSPLGKRIGEDIKGQVEAACEFDDFVFHLQQSGGHVAALHAHRAHEFFARVDIARFFYSIARSRVQRALAEIGILRARHYAKWSCVKNPYGDPTYALPYGFIQSPILATLVLMQSVVGNYLRSISTGGLISVSVYMDDISLSSDSFDGLIAAFEKLKQKLAEAHFGLNPAKEREPSPAMDVFNCDLSRGTAGVQQKRIDLFYSQGHSPLSVAGFEDYCARVVDGNAS

SEQ ID NO: 1315 - protein, 274 aa, unidentified
  source 1..274: note = uncultivated organism;MG160-326 reverse transcriptase
MESTKPFFIVADVARALKINEDDLRRLANSAPRLYRISQLPKKSGGFRVIEAPLKHLKEVQKKVLSHILNRIASHPILHSGPATSTKTAARAHLRQPLVVTLDIQDFFPSIRAATVCRAFESNGFDNESSRLLTRLVTRKSRLPQGAPTSSSIARIVLFDLCEELQALLKTVSLHSRATIYVDDVTISGPIGLQRLVPTIVSMFRRYGYRLNQAKKKVMPSVEEQVVLGLRVNHRLEPCSEFEKTLEAERATRHPRDPKLKGLESYRRFVIQPS

SEQ ID NO: 1316 - protein, 215 aa, unidentified
  source 1..215: note = uncultivated organism;MG160-327 reverse transcriptase
MLAYFKRRVTFPDYMYHFKKGGHVAALHVHLNNHSFFKIDIQNFYYSIARMRVTRALRQWGYPGANTFAMWSCVRNPLPGPKHALPIGFVQSPLLASLALMKSEVADAIERARAKGVCISVYLDDFIGSHDNEALLTAAYEDIRDTCVAASFIPNPGKLVSPQAAITAFNCDLTNGSAEVTAARVAKYFARPDRTPLSDVGFDDYRDLVRSQNTP

SEQ ID NO: 1317 - protein, 242 aa, unidentified
  source 1..242: note = uncultivated organism;MG160-328 reverse transcriptase
MLENYKFKFRSRGKFIFVPNERCVRKGERIMAFVAKRAKLPDYFYHYQPGGHVAALLSHAPHTLFFKIDIQNFFYSIARMRVARALRDYGLQGAHTFARWSCVSNPLSGPKFVLPIGFVQSPLLASLVLMRSPVADAIERAKNSGATISVYLDDIVGSHNDHGTLTAIYDDIRQACVTSNLIPNPNKLVSPTAAIVVFNCNLAHGRALVTEDRLAEFLAVPRTDASRQAFDQHRNRVAAANG

SEQ ID NO: 1318 - protein, 253 aa, unidentified
  source 1..253: note = uncultivated organism;MG160-329 reverse transcriptase
MNPKWSSKFELKPGKWVFVPTADAVLEGKRIKKAIEKCWRPPSYYFHLRAGGHVEALRSHLAHDNFLHIDIQDFFGSISRTKVTRCLKDKFSYVIARSYANASTVSDPVIAKRIIIPFGFVQSQIVAAVCLAKSALGIYLDQLSLNPVVALSVYVDDIIVSTSDAVLLEKVLKDIEVAAKKAHFVLNADKQEGPAAVITAFNIVLEKGSMKVEADRIKKFEEALTTATSESQRAGIKSYVTSVNAAQGLAISL

SEQ ID NO: 1319 - protein, 223 aa, unidentified
  source 1..223: note = uncultivated organism;MG160-330 reverse transcriptase
MIVNYDFKYRARGKWFFKPNDKCVRRGDRMLEYFKRRVVFPDYMYHFRKGGHVAALHAHLNNKLFFKIDIQNFYYSIARMRVTRALRDWRYPGAGTFSKWSCVLNPLPGPKHALPIGFVQSPLLASLVLMKSEVADAIGRARANGVCISVYLDDFIGSHDDVAVLTAAYEDIRETCVKAGFIPNPTKLDDRFHETCLDGTGRNLFESSIYTEHGGFSSCYCGG

SEQ ID NO: 1320 - protein, 218 aa, unidentified
  source 1..218: note = uncultivated organism;MG160-331 reverse transcriptase
MQTKLRIAVLDKLPVHPNLHGVRGTSQITAAAVHRSQAVIITMDIKDFFPSVTAEMVREALAIHKANGSVADLICRLVTRKKRLPQGAPTSPAVARIVIAPAVERLRGLLASVSPTCKIAVYVDDISLSGPLGLQRAIPTVMKILHEHGFEFSERKTRVSKGDEDKEVLGLKVSCRLEPGTAFRQKLELARQSLPSTSPSLKGLESWPQTISRLSRLH

SEQ ID NO: 1321 - protein, 274 aa, unidentified
  source 1..274: note = uncultivated organism;MG160-332 reverse transcriptase
MEKFKLPSNVIELAKVLGLTENNLQELAHAAPNLYRTKREPKKSGGFRVINPPFKRLKDVQGKILRTILNKIPVHQMLHSGPKTSTKSAAKAHVGQPVVIALDIQDFFPSVQSKTICRTFEANGFPENVANLLTRLTTHKSRLPQGAPTSPAIARIVLCDACKEFETLLNSVSPYAKATIYVDDITISGPFGLERLIPTIISIFKRHGYSVNPSKIKKMTQSQEQIVLGLRVNRRVEPSSEFNVTLKSERQKLHPQDPKLKGLESYKNYIVRED

SEQ ID NO: 1322 - protein, 325 aa, unidentified
  source 1..325: note = uncultivated organism;MG160-333 reverse transcriptase
MVDKHGSEGQGEGPLRKGALRRIPRGFTALPDDWRWGRFHLAPIAIFGNMRNVARSFVKDGTRYFVLTKSYAGWRSLSEGARAAYDGEEEWQHLKERILSHWRPNAAFTTFSKRAHVAALRPHLDNKYFAIIDLKSFFDHVTRTKVCRALEAIGFARSDAFAVAGESTIRQGEKHTLPRGFRQSSLLATLALEKSLFGSALRGHRFGSRITVYSDDIIFSNNDPEALADEHSQAIELLQRSHFPINPTKTQTARTEVDIFNLRMSHRTLRFTDQRMWKFLEQAASFVKADNAENTLYVYEMLFGDYIRSINPEQEKRLRTSLGIA

SEQ ID NO: 1323 - protein, 244 aa, unidentified
  source 1..244: note = uncultivated organism;MG160-334 reverse transcriptase
MIENYKFKYQSRGKWFFVPNERCVRRGERMLKFFSKRVNFPDYFFHYKKGGHVAALHAHLQNALFFKIDIQNFYYSVARMRVTRALRHWGYPGANTFAKWSCVSNPLPGPKHALPIGFVQSPLLASLALMRSPVHDAIERAQANGVCISVYLDDFIGSHNDPAVLTAAYEDIRAACVDAGFIPNPTKLVPPSAAITAFNCDLTSGSALVTPTRVNKYLASPERTLMSDAGFAQYQALVAAQNVP

SEQ ID NO: 1324 - protein, 244 aa, unidentified
  source 1..244: note = uncultivated organism;MG160-335 reverse transcriptase
MIENYKFKYQSRGKWFFVPNERCVRRGERMLKFFSKRVNFPDYFFHYKKGGHVAALHAHLQNALFFKIDIQNFYYSVARMRVTRALRHWGYPGANTFAKWSCVSNPLPGPKHALPIGFVQSPLLASLALMRSPVHDAIERAQANGVCISVCLDDFIGSHNDPAVLTAAYEDIRAACVDAGFIPNPTKLVPPSAAITAFNCDLTSGSALVTPTRVNKYLASPERTLMSDAGFAQYQALVAAQNVP

SEQ ID NO: 1325 - protein, 242 aa, unidentified
  source 1..242: note = uncultivated organism;MG160-336 reverse transcriptase
MLENYKFKFRSRGKFIFVPNERCVRKGERIMTFVAKRAKLPDYFYHYQPGGHVAALHSHVPHTLFFKIDIQNFFYSIARMRVARALRDYGLQGAHTFARWSCVSNPLSGPKFVLPIGFVQSPLLASLVLMRSPVADAIERAKNSGATISVYLDDIVGSHNDHGTLTAIYDDIRQACVTSNLIPNPNKLVSPTAAIVVFNCNLAHGRTLVTEDRLAEFLAVPRTDASRQAFDQYRNRIAAANG

SEQ ID NO: 1326 - protein, 245 aa, unidentified
  source 1..245: note = uncultivated organism;MG160-337 reverse transcriptase
MIENYKFKYRSRGKIFFVPNEKCERRGRRMIQFFSKRMDFPDYFFHYKKGGHVAALHAHLANQLFFRIDIQNFYYSIARMRVTRALRHWRYPGAGTFAKWSCVANPGPGPRFAVPIGFVQSPLLASLVLMRSPVNDAIERARANGVCISVYLDDFIGSHNELDVLTAAYEDIRATCVATGFIPNPGKLVPPRSAITAFNCDLTNGSALLTADRIKKYLASPTRTAMSDAAFDQYKDLVGSQNTVP

SEQ ID NO: 1327 - protein, 274 aa, unidentified
  source 1..274: note = uncultivated organism;MG160-338 reverse transcriptase
MEKFKLPSSVIELAKVLGLTENDLQKLAHAAPNLYNSRPEPKKHGGFRIINRPFKHLKSVQQKILRLILNQIPVHQTLHSGPKTSTKSAAKAHVKQPVVIALDIQDFFPGVKSKTVCRAFEANGFPEDVADLLARLTTHKSRLPQGAPTSPAIARIVLYDVCKEFEKLLSSVSPHARATIYVDDITISGPLGLERLIPTIISIFERHGYSVNPLKKKVMTQNEEQVVLGLRVNCRVEPSSEFEATLELERQKRHSRDPKLKGLESYKNYITHGN

SEQ ID NO: 1328 - protein, 242 aa, unidentified
  source 1..242: note = uncultivated organism;MG160-339 reverse transcriptase
MLLEDAYPQELSKRRKTRLIEPPYENLKKVQKLFLDRVLSRMKVHPMLHGGKGASTKKAARCHIRKQLVITMDVQEFFPSIKSSMVRKMFVSRGMDEDAARVFTRLVTRGNHVPQGAPTSPCIGRLVLDPVAAELAKLLESIHSTSAGSIWVDDMTLSGPRGMVRLKSTVVGIFRRHGFSIHPDKMQVMFRDQEQESLGIGLNDGITAPNKYLEKLNEFAIEAPSSNPRLKGMRNYVRGLSG

SEQ ID NO: 1329 - protein, 244 aa, unidentified
  source 1..244: note = uncultivated organism;MG160-340 reverse transcriptase
MFLNYEYQWVRKGKFIFAPNDDCDRRAKQLIRFVEKSVELPVCFYHYRKGGHVAALHRHLENPFFFKIDIRNFFYSISRNRIASVLHRVGFPYARTFAKWSAVRSPYPDGPRYVLPIGFRQSPLLASLCLMRSPVMDVVAWAEEAGAFVSIYLDDLICSGPDEGALHDLYELFLDAFREANLTPHPDKIVAPTDALEVFNCELRQGVARVTPQRIAAFFEEPRGPEAISAFEAYCERVSERNAA

SEQ ID NO: 1330 - protein, 404 aa, unidentified
  source 1..404: note = uncultivated organism;MG160-341 reverse transcriptase
MSILSEKRTVRSIAKELGMSETGVRELAESAPRLYRQSKMVKKLGDVSTYKFSADDITNLPAVVKKLGRPIDSDTLSAYLNDRLSTNTRELMAGYPGGCDSALRAALVRDLNRALEHETIYNRARFSKIKLETETRRLIEKWVHGRLVERKVYGPALVRLNRMLLEDAYPEELVKRRKTRKIEPPREDLKKIQKRFLDKVLAKMEVHPMLHGGEGSSPKKAAAQHVKKPMVITMDVREFFPSIKSRMVRKMFLSRGMDADAAQVCTRLVTSGNHVPQGAPTSTCIGRLVLNPVALELEGLMKSVHHSSAAGIWVDDLTLSGPSGMTRLKGTVISIFKRHGFEIHPEKIQVMPRGEEQVSLGVRLNNGIGVPTAYLKKLGEFAKQVPSSNPSLKGMHAYVKGLSG

SEQ ID NO: 1331 - protein, 246 aa, unidentified
  source 1..246: note = uncultivated organism;MG160-342 reverse transcriptase
MPVHFQNFAYSFENQRGKPVFVPSQRGYEIGYELKERVENAFFIDEMFFHFRRGGHLGALHMHRANRYFARSDLQNFFYSISKHRVARALHDTGIAKAGHFAKWSCVKNPYAPPSYALPYGFVQSPLLATLVFSRSPIGAFLREIQGRTTVTVYMDDIAISSDSLDLLQEIFPLLQAKIEEAQFQINPNKTIAPCPSIELFNCGLELNRTAVTEDRVAEFYNEPRSGLSVEAFRRYCASVEHGNRP

SEQ ID NO: 1332 - protein, 244 aa, unidentified
  source 1..244: note = uncultivated organism;MG160-343 reverse transcriptase
MFLNYEYQWVRKGKFIFAPNDDCDRRAKQLIRFVEKSVELPDCFYHYRKGGHVAALHRHLENRFFFKIDIRNFFYSISRNRIASVLHRVGFPYARTFAKWSAVRSPYPDGPRYVLPIGFRQSPLLASLCLMRSPVMDVVAWAEEAGAFVSIYLDDLICSGPDEAALHDLFELFLDAFREANLTPHPDKIVAPTNALEVFNCELRQGIARVTPQRIAAFFEEQRGPEAISAFEAYCERVSERNAA

SEQ ID NO: 1333 - protein, 270 aa, unidentified
  source 1..270: note = uncultivated organism;MG160-344 reverse transcriptase
MLGTYNHKFILPKGQQVFVPSAASRQAGVVVHAEVRRRWHRPPHFYHLRPGGHVAALKTHVHNRCFATLDIHHFFDSVTRTKIHRALCSIGIEHRRAWEIAQESTVEKHRQRRDFSLPYGFVQSPALASLALDRGALGREMKTIARSNHTRLSCYVDDVILSGIEEEAVESSRLALIEAARQSGFAFNDTKSQRPGSEITAFNVALSNGTLAITGDRMREFEDDILRSPPAAVIAIIGYVRSINRAQADALVEVALTSPDDAVREAAAKA

SEQ ID NO: 1334 - protein, 246 aa, unidentified
  source 1..246: note = uncultivated organism;MG160-345 reverse transcriptase
MYRCYPKRKKSGGVRQIEEPFPILKNAQRKLCHLFLNGIPIHDCLHGHKGTSQISAAKNHVRQPIVIAMDIQNFFPSVRKGMINRALLSNGMNAAMSDRVCRLTTRKNRLPQGAPTSPVLARIVISPVLIRIENMLSNISLNCRFAMFVDDLSLSGPEGLRRAIPLIVRIFKQNGFNFRPEKTKVMKGSDEKEVLGIRVNERLEPGAEFRLKLDLARRDRKTSPDRRRALEAWRRKLITSGVSVSK

SEQ ID NO: 1335 - protein, 274 aa, unidentified
  source 1..274: note = uncultivated organism;MG160-346 reverse transcriptase
MKKFQLPDSAAKLAKVLGLTENDFQALAKAAPSLYRTKREPKKNGGFRIINPPFIHLKTVQKKILQAILNQIPIHQILHSGPKTSTKSAAKAHVKQPVVIALDIQDFFPSVQSKTVCRAFEANGFPEDVANLLARLTTHKGRLPQGAPTSPAIARIVLYDACKEFETLLNSVSPYAKATIYVDDITISGPLGLERLIPTIISIFKRHGYSVNPSKIKKMTQSEEQIVLGLRVNRRVEPSSEFNVTLKSERQKLHPRDPKLKGLEAYKNYISRED

SEQ ID NO: 1336 - protein, 245 aa, unidentified
  source 1..245: note = uncultivated organism;MG160-347 reverse transcriptase
MLENYECKFQTRGKTIFVPNERSVRKGRRILKFFSKFEFPDYFYHYKSGGHVAALHAHLGNKLFFKIDIQNFYYSIARMRVTRALRSWGYPGANTLAKWSCVANPYPGPRHVLPIGFVQSPLLASLVLLKSPVAVAIERAIKNGVCISVYLDDFVGSHNDPAVLEAAYDDIRDTCVAARLVPNPAKLLTPRAAITAFNCDLTEGSVLVTAERVAKYYASTARTVETDAAFEEYLNLIASANKAAI

SEQ ID NO: 1337 - protein, 253 aa, unidentified
  source 1..253: note = uncultivated organism;MG160-348 reverse transcriptase
MLNNYKYSFTEGSGRLIFVPTLSSRSLGRKLHRDILRRWSPPDYFYHFKEGGHVAAARVHLTSGIFVRLDLHRFYDSITRSKVHRALRDIKFRQKDAWHISCQSTVSKNKIGGPFSLPFGFVQSPVLSSLVLSSSALGKTLSILYVSGIKLSVYMDDIIMSGDNSSSLAAAMLALENAARTAGFQFNISKSFGPAPALEAFNLDLSHRTLVVSASRMANFAAAMITGNSITRNGILGYVGTVNIHQRAELASL

SEQ ID NO: 1338 - protein, 301 aa, unidentified
  source 1..301: note = uncultivated organism;MG160-349 reverse transcriptase
MHCLPQSEQEIAQFLGVSPERLRFFYAHMSGHVRRWPKSKKSGGTRTIVEPDAELLDLLRQISRKLLTPIPLHPYIYHRTGSSYLNLINMLRRSSFILTADINNFYPNITPHKVFTSLQRKGYGLQAAKVFTKLTTFKYQLPQGFPTSPILAAIVIEPTLIRLDGMARAYDVLVGIYADDLVIGAKFDFAGHMPLIKKIFKDSGFEIAKFRAMGNEVKREIMGIELHHGKLRVSKSYLDGIQRLSDELGQALTNQDLFEERARVIQGRISFIESVNPHQAHPFIKDINKKLKANWVGKRKT

SEQ ID NO: 1339 - protein, 270 aa, unidentified
  source 1..270: note = uncultivated organism;MG160-350 reverse transcriptase
MPHAFENYLHSYWKNGKPIFVPNDFSSDLGTKLKRKIAKKYTFDKFVYHFKDGSHVVALHRHRNNQFFCRIDLEKFFYSIRRNRVKRVLKSIGIRNPEYYAKWSTVKNPFAGGGYVLPYGFVQSPILATLVLAESPIGTYIRKLPLGIAASVYMDDICLSGPDEDQLAEAFKGLLVAVEEAGFQLNHDKTREPAKQIDIFNCTLEHGTTEVTPARVVKFYDVPRSANGVASFETYCDIVKSHTWRVGAGKRRRRKLYAAKHKAAKAAPAA

SEQ ID NO: 1340 - protein, 260 aa, unidentified
  source 1..260: note = uncultivated organism;MG160-351 reverse transcriptase
MEMWKHKFELKKDRWVYVPTREIANLGKKIHQYLMFEWNTPLHFYHLRDGGHVAAAKLHTGNKFFALIDIQDFFNCTTQSRVTRELKKFIPYAEARKLAKLSTVIIPNIQPVRRAIPYGFPQSPILATLCFNNSHAGGVISNIIKSGQVRISVYMDDIIISGNDVAVLNQEFEKVLTALVKSKYEINEKKKKLPSLEIKVFNMLLSHNSLRVAPERMIAFVQAYAKSESDDERGGIARYVYSVNEQQARRHFPKHMPDYE

SEQ ID NO: 1341 - protein, 244 aa, unidentified
  source 1..244: note = uncultivated organism;MG160-352 reverse transcriptase
MAVAIHNYSFKYDRRGKPVFAPSKVGRRIGQEIKDAVEASFAFSPIYFHFRPGGHVAAIHHHRPRRFFARVDIARFFYSISRRRVQSALDRLGVGNAAFYAKWSTVANPFEAPRYALPYGFVQSPILASLVLASSTVGEHLGSLPPEVTVSVYVDDISLSSDDLGALEAAYHATIGVLEADNFQVSADKLRPPAAAIDVFNCDLAHGHAKVRDDRIGQFMADAPSQEAEAAFAAYCASVEVGNG

SEQ ID NO: 1342 - protein, 247 aa, unidentified
  source 1..247: note = uncultivated organism;MG160-353 reverse transcriptase
MPVRFENFEYSYTRQGRPYFSPSPLGRKIGNDIKSQVENAHTFDPFVYHLRGGGHVAAVHSHRAHHLFARVDIRRFFYGISRSRVQRALQNIGILRARHYAKWSCVKNPYSEPPYSLPYGFVQSPVLATLVLMQSEVGNILRIFDADPVITVSVYMDDITLSSDDRAKLQVAYLDLLTSLATANFDVSPRKLRPPASEVDVFNCDLKHGSTEVRPDRVAEFLGSNPNHASMVGFARYQMSVEAGNTP

SEQ ID NO: 1343 - protein, 253 aa, unidentified
  source 1..253: note = uncultivated organism;MG160-354 reverse transcriptase
MDMWKHKFEIKKNRWVHVPSKEMALFGKKLHKVIRIKWSSPDYYFHLRNGGHVSSAEMHKVNEYFSLVDISNFFESTSQSRVTRELKTLFPYEKARKIAKISTVRVPGRSVKKFSVPYGFPQSPILASLCLHNSFAGRVLDSICKSDNVLVSVYMDDIIFSSKDLTAINNAFDSFCTALEKSRYQINKDKTQVPSKKIAVFNLELSHDHLKVSSARMVQFVIAYAKSTNEYEREGIASYVRSVNPVQANRHFP

SEQ ID NO: 1344 - protein, 246 aa, unidentified
  source 1..246: note = uncultivated organism;MG160-355 reverse transcriptase
MPVQFQNFDYQYTKAGKPYFCPSPLGRKIGDDIKTQVEAAYEFEDFVYHLRNGGHVAALHSHRHHAFFARVDIRRFFYSIARSRVQRALTSAGIIRARHYAKWSCVKNPYGNPTYSLPYGFVQSPILATLVLMESGVGGFLRQAHLDPDITVSLYMDDIALSSDDPGKLDAAFRELLAKLLEAHFEVSDNKVREPSPAMDLFNCDLRTGHTEVRQDRVDEFLSVARSQPSLEGFARYQLSVEEGNV

SEQ ID NO: 1345 - protein, 244 aa, unidentified
  source 1..244: note = uncultivated organism;MG160-356 reverse transcriptase
MAVKFENFSHRFDRKGKPVFAPSELGRRIGSDVKARVESAYKFEPRYTHLMPGGHVSAIHGHRQNAYFCKIDLERFFYSIGRNRVIRALREIGVERPEFYGKWSCVKNPYEDPSYSLPYGFIQSPCLATLVMSLSVLGEFMRTLPEEVLATVYVDDICLSSRDPKMLSEAFEALLVAVDQAGFLVNRSKVVAPTTTIEVFHCSLEMRRSVVTEARIAEFWSVSRTAASSDAFARYVEGVASGNN

SEQ ID NO: 1346 - protein, 270 aa, unidentified
  source 1..270: note = uncultivated organism;MG160-357 reverse transcriptase
MPHAFENYLHSYWKNGKPIFAPNDFSSDLGTKLKRKIAKKYTFDKFVYHFKDGSHVVALHRHRNNQFFCRIDLEKFFYSIRRNRVKRVLKSIGIRKPEYYAKWSTVKNPFAGGGYVLPYGFVQSPILATLVLAESPIGTYIRKLPLGIAASVYMDDICLSSPDEDQLAEAFKGLLVAVEEAGFQLNHDKTREPAKQIDIFNCTLEHGTTEVTPARVVKFYDVPRSANGVASFETYCDIVKSHTWRVGAGKRRRRKLYAAKRKAAKAAPAA

SEQ ID NO: 1347 - protein, 260 aa, unidentified
  source 1..260: note = uncultivated organism;MG160-358 reverse transcriptase
MEMWKHKFELKKDRWVYVPTREIANLGKKIHQYLMFKWNTPLHFYHLRDGGHVAAAKLHTGNKFFALIDIQDFFNCTTQSRVTRELKKFIPYAEARKLAKLSTVIIPNIQPVRRAIPYGFPQSPILATLCFNNSHAGGVISSIIKSGQVRISVYMDDIIISGNDVAVLNQEFEKVLTALVKSKYEINEKKKKLPSLEIKVFNMLLSHNSLRVAPERMIAFVQAYAKSESDDERGGIARYVYSVNEQQARRHFPKHMPDYE

SEQ ID NO: 1348 - protein, 254 aa, unidentified
  source 1..254: note = uncultivated organism;MG160-359 reverse transcriptase
MLHPKWSTKFELKPGKWVFVPTSESIEEGRKIKKAIEDYWEPPRYYYHLRSGGHVEAIKSHLKHNSFLHFDIQDFFGSINRSRVTRTLIGKFSYENARAMAHASTVRHPDEKSRLILPYGFIQSQIVAALCLNISRLGKYLNKLSKNSDVSLSVYVDDIIVSCNDSELSASILVNITNAAENANFILNAAKQEGPAAAITAFNIMLQNNSMMVEALRLKKFVDVLKETESEYQREGILSYVKSINVAQGFALKI

SEQ ID NO: 1349 - protein, 255 aa, unidentified
  source 1..255: note = uncultivated organism;MG160-360 reverse transcriptase
MKVEIWKHKFEIKKGRWVHVPSKEMYLAGRKIHNFILKRWRPYFYYYHMRNGGHVLASKIHLENNYFALIDISNFFECTSQSRVTRELKTLLPYNKAREIAKLSTVRVPKSDPKKFSVPYGFPQSPILATLCLNNSYAGNLIETLRCEYNLTVSVYMDDIIISCNDYDLLCYCYERINFSLIKSNYSLNLAKSQQPSREIEVFNLRLSHNDLAVTSKRMVYFIKSYSESENDFEREGIAAYVRSVNSTQANKHFL

SEQ ID NO: 1350 - protein, 245 aa, unidentified
  source 1..245: note = uncultivated organism;MG160-361 reverse transcriptase
MPVAIHNFDYSYQRKGKPVFVPSARGRRTGMRVKEAVETNFTFDALYFHMGAGGHVAALHHHRGSAFFARIDIARFFYSISRRRVQSALSRIGVPQARIYAKWSTVRNPYGDPIYSLPYGFVQSPILASLVIATSAVGAALEAISPDVKVSVYMDDIAVSGDDLSAVQRVYDDLIDLLQADGFDLSRDKLRPPSPAMDIFNCDLTHGRASVQDERINAFLAGSPSQKSEDAFVAYCATVEAGNVS

SEQ ID NO: 1351 - protein, 260 aa, unidentified
  source 1..260: note = uncultivated organism;MG160-362 reverse transcriptase
MEMWKHKFELKKDRWVYVPTREIANHGKKIHQYLMFKWNTPLHFYHLRDGGHVAAAKLHTGNKFFALIDIQDFFNCTTQSRVTRELKKFIPYAEARKLAKLSTVIIPNIQPVRRAIPYGFPQSPILATLCFNNSHAGGVISSIIKSGQVRISVYMDDIIISGNDVAVLNQEFEKVLTALVKSKYEINEKKKKLPSLEIKVFNMLLSHNSLRVAPERMIAFVQAYAKSESDDERGGIARYVYSVNEQQARRHFPKHMPDYE

SEQ ID NO: 1352 - protein, 253 aa, unidentified
  source 1..253: note = uncultivated organism;MG160-363 reverse transcriptase
MEMWKHKFEVKKNRWVHVPTKEMSLFGKKLNKIIHSKWKAPIYYYHLRNGGHVASARVHIENEYFSLIDISNFFESTSQSRVTRELKKIIPYEKARRIAKLSTVRVPNLKEKKFSIPYGFPQSPILASLCLRNSYAGSVLDSIVKAGIVEVSVYMDDIIFSSKDWVAINEAFDFFGSALERSKYKLNDEKTQRPSKHLVAFNLELSYGNIKVTPKRLVQFIQAYAQSENEYEREGIAAYVHSVNPCQAKLHFP

SEQ ID NO: 1353 - protein, 253 aa, unidentified
  source 1..253: note = uncultivated organism;MG160-364 reverse transcriptase
MEIWKHKFEIKKGRWVHVPSKEMYLAGRKIHNFILKKWRPYFYYYHMRNGGHVLASKIHLENNYFALIDISNFFECTSQSRVTRELKTLLPYNKAREIAKLSTVRVPKSDPKKFSVPYGFPQSPILATLCLNNSYAGNLIETLRCEYNLTISIYMDDIIISCNDYDLLCYCYERISLSLIKSKYSLNLAKSQQPSREIEVFNLRLSHNDFAVTSKRMVDFIKSYSESENDFEREGIAAYVRSVNSIQANKHFL

SEQ ID NO: 1354 - protein, 260 aa, unidentified
  source 1..260: note = uncultivated organism;MG160-365 reverse transcriptase
MEMWKHKFELKKDRWVYVPTREIANLGKKIHQYLMFKWNTPLHFYHLRDGGHVAAAKLHTGNKFFALIDIQDFFNCTTQSRVTRELKKFIPYAEARKLAKLSTVIIPNIQPVRRAIPYGFPQSPILATLCFNNSHAGGVISSIIKSGQVRISVYMDDIIISGNDVAVLNQEFEKALTALVKSKYEINEKKKKLPSLEIKVFNMLLSHNSLRVAPERMIAFVQAYAKSESDDERGGIARYVYSVNEQQARRHFPKHMPDYE

SEQ ID NO: 1355 - protein, 243 aa, unidentified
  source 1..243: note = uncultivated organism;MG160-367 reverse transcriptase
MIENYEFKYLSRGKWIYKPKKSCDRRGQQVIDFIERCVDFPDYFYHFRSGGHVAALHEHLKNTFFFKIDIQNFFYSIARNRVHRALAKCGMRGAPTFAVWPTVRSPYPRGPKFVLPIGFKQSPHIASLVLMNSPVATAIADQQAKGVLISVYLDDIIGSAHDKILLTAAYDAINTACETANLTPNPAKLIEPKAKIVAFNCDLANGAAEVTDDRIAKFYAKYPSVRSKESFEAYVARVASQNV

SEQ ID NO: 1356 - protein, 208 aa, unidentified
  source 1..208: note = uncultivated organism;MG160-368 reverse transcriptase
MLAPQAYTVDSLARVLLLSTDECRDLSQAAHRLYRVMVRLKPSGAQRLIEAPFPRLKKIQGALNEEIFNKIEIHPCFHGKPGTSQLSAARTHVRQPMVVTMDVRNFFPSITSQKVAASLIAQGFTPGVAEVLTKLCTRKRRLPQGAPTSPALARIVTSPILTETENIFRNVSPFCRITQFVDDLAVSGPNGIQRLIPTLHRLWRRHGL

SEQ ID NO: 1357 - protein, 241 aa, unidentified
  source 1..241: note = uncultivated organism;MG160-369 reverse transcriptase
MPLNFKFTYLRKGKHVFVPNDESIARGETLLRHCRQNVQFPDYFFHYRSGGHVAALHEHLQNNFFFRIDIEHFFYSVSRNRVAGALHSTGFHHARTYAQWSCVKNPLAGPRYALPIGFVQSPILASLCIMRSPLAAAIESARQSGVLISIYFDDFIGSAYEREPLEAAYQALLKACGDAAFGANAAKLLSPRDEIEAFNCRLSHGIAEVTPARIQEFLKKGASADSAAAFDAYCNRVAARN

SEQ ID NO: 1358 - protein, 254 aa, unidentified
  source 1..254: note = uncultivated organism;MG160-370 reverse transcriptase
MRENYLYHYKRRDKHVFVPTPECDRRGDELLEFGATLSLPDYFFHYQKGGHVKALHHHINNTHFFRIDLKNFFYSIARNRVNRLLRAYGFSKNARTYAEWSTVRNPYSGGSRYALPIGFRQSPLLASLALYRSSVASAIEDALRRRVLVSVYFDDLVGSSCDVKELQTTYDGILEACVQANLAANADKLLPPAQAIVAFNCNVRFGHASVTGERIDRFDATNPSSEAISAFLAYCGRVERFNHAPGSSIDVLST

SEQ ID NO: 1359 - protein, 276 aa, unidentified
  source 1..276: note = uncultivated organism;MG160-371 reverse transcriptase
MTNIQIISDLISSYPVSGKTWVHHETKPHGGYRKIISPNRQLNSWLKKANTQLYKLCLPWPDIMHGGIKKRSYVTFAQPHVGKQHVITVDIRKCFDNIRDYKVAEVLAAELQISEDVAAILAKLLCYKRVLPQGYATSNLICNLVLRERMNKINLDLSSMGYTVTNYVDDIAISGNIENPHEVINSVATELSRCGLAINKLKVKVYPANKPQTICGLTVNKKLAISRGKRLQLCRAVATGSISDESLQGWLANLHSVNPEFESKLRAYAQKSGYIL

SEQ ID NO: 1360 - protein, 243 aa, unidentified
  source 1..243: note = uncultivated organism;MG160-372 reverse transcriptase
MIENYEFKYLSRGKWIYKPKKSCDRRGQQVIDFIERCVDFPDYFYHFRSGGHVAALHEHLKNTFFFKIDIQNFFYSIARNRVHRALAKCGMRGAPTFAVWSTVRSPYPRGPKFVLPIGFKQSPHIASLVLMNSPVATAIADQQAKGVLISVYLDDIIGSAHDKILLTAAYDAINTACETANLTPNPAKLIEPKAKIVAFNCDLANGAAEVTDDRIAKFYAKYPSIRSKESFEAYVARVASQNV

SEQ ID NO: 1361 - protein, 275 aa, unidentified
  source 1..275: note = uncultivated organism;MG160-373 reverse transcriptase
MTPPTALQMSPEVLAGIVSMPLDRLTKISRAAHRLYIVSNLPKKDGGTRLIEAPYKSLGEIQHSLHKKVLSQVAVHEVLHGRPNTSQLTAAQVHVRQPMVVTMDVRNFFPSVTTTMILGALKKAGFPKQTSEIITRLCTRKRRLPQGAPTSPVLSRIVVTPILHEIEKLVSSVSPHCRITQFVDDLAISGPLGIHRLIPIVHKIWERHGFTIHPQKTKVMGRSKAQEVLGVWVNNRLEPTKDFLDRLADAKEKLPPNDLHRLGLESYHRSIINSG

SEQ ID NO: 1362 - protein, 248 aa, unidentified
  source 1..248: note = uncultivated organism;MG160-374 reverse transcriptase
MTVQFQNYDYSYNRDGKPVFAPSGLGARIGQDIKGQVEAVYVFDDFVYHLKKNGGHVAALHTHRLHQFFARVDIKNFFYGIAKSRVQRSLADLGIQRARHYAKWSCVKNPFDGPRYALPYGFIQSPILATLVLMKSAVGSFLRGVAATGHIAVSVYMDDISLSSDDEAALYGAFEQLKAKLQEANFEISAGKMREPSTAMDVFNCDLSHGKTEVRSDRIGEFYAEMRSPASVDGFEEYCARVQEGNSP

SEQ ID NO: 1363 - protein, 222 aa, unidentified
  source 1..222: note = uncultivated organism;MG160-375 reverse transcriptase
MRHFSRFKFPAHYFHFQSGGHVSALHTHIGQRYFFKIDIQNYYYSIARMRVTRALRSFAYPGANTLAQWSCVSNPYSDGHRHVLPIGFVQSALLASLVLMKSPVANAMKRAIARGVVITIYMDDFIGSHNDPAVLQEAYEDIRTASVAAGLLPNPEKLVPPTQAIVAFNCDMTFGKVVVQTQRIEKYCAKEDRSAASDASFIHYVGRVQASNHAATPIPKLA

SEQ ID NO: 1364 - protein, 248 aa, unidentified
  source 1..248: note = uncultivated organism;MG160-376 reverse transcriptase
MLINYDLKYQTRGRWIFVPTDQCERKGRRIIKFFSRFKFPDYFYHYSPGGHVAAMHAHLKSKLFFKIDIQNFYYSIARMRVTRALRSHGYQGANTLARWSTVRNPYPGDHAHVLPIGFVQSPLLASLVLMKSPAAAAIERAIANGVCISVYMDDFIGSHNDAAALEAAYADIRDACVAAGLVPNPAKLVAPAAAITAFNCDLTFGSANVSAERVAKYQARGDRTADSDASFAQYRDLVAAANIAPAAE

SEQ ID NO: 1365 - protein, 244 aa, unidentified
  source 1..244: note = uncultivated organism;MG160-377 reverse transcriptase
MAVAIPNFEYSYRRKGKPIFVPTAIGRRIGNEVKSEVESAYDFDPIYFHLRRGGHVAAMHHHRDNLSFARIDISKFFYSVSRRRVQSALDRIGVPNARFYAKWSTVENPYDDPKYALPYGFVQSPILASLVLATSQVGEHLLALDPAISVSVYMDDISLSSDNKDKLEEAYTSTLATLERDGFQLSAEKLRPPAAKIDIFNCDLMHGCSTVQDGRVAEFFANQPNPLSEEAFLAYCASVEEGNR

SEQ ID NO: 1366 - protein, 245 aa, unidentified
  source 1..245: note = uncultivated organism;MG160-378 reverse transcriptase
MAVAIPNFEYSYRRKGKPVFVPTAIGRRIGNEVKAKVESAYSFDPIYFHLRPGGHVAAMHHHRDNRSFARIDISRFFYSVSRRRVQSALDRIGVGNARFYAKWSTVLNPYDDPKFSLPYGFVQSPILASLVIATSQVGDHLQRLPATVRASVYMDDISLSSDDHGALLDTYASTLAVLEADGFEVSVEKLRTPAAAIDIFNCDLSHRRSVVREDRIAEFFAGEPNEISEEAFSSYCASVEVGNQL

SEQ ID NO: 1367 - protein, 255 aa, unidentified
  source 1..255: note = uncultivated organism;MG160-379 reverse transcriptase
MKQTINWLHKFEIKKDRWVYIPNAKTLKSGRKIHNLIRFKWKSPLYMFHLRDGGHVAAAKYHIKKKYFSLIDISDFFGATSQSRVTRALGRLVPYVKAREIAKESTVKNLNGNGLKDVIPYGYPQSPILASLCLHQSFCGGVINTLSKSGRVSVSIYMDDILLSSDGLDLLKNAFDAVTEALVKSGYTVNDRKTQSPATMVSVFNLELSQHSLRVSSERIVEFLKAYISSKNPHERKGIASYVGSVNKAQAKIFR

SEQ ID NO: 1368 - protein, 248 aa, unidentified
  source 1..248: note = uncultivated organism;MG160-380 reverse transcriptase
MLINYDLKYQTRGRWIFVPTDQCERKGRRIIKFFSRFKFPDYFYHYSPGGHVAAMHAHLKSKLFFKIDIQNFYYSIARMRVTRALRSHGYQGANTLAMWSTVRNPYPGDHAHVLPIGFVQSPLLASLVLMKSPAAAAIERAIANGVCISVYMDDFIGSHNDAAALEAAYADIRDACVAAGLVPNPAKLVAPAAAITAFNCDLTFGSANVSAERVAKYQARGDRTADSDASFAQYRDLVAAANIAPAAE

SEQ ID NO: 1369 - protein, 246 aa, unidentified
  source 1..246: note = uncultivated organism;MG160-381 reverse transcriptase
MSVSFQNFDYTYRRKGKPVFAPSELGRKIGQDIKQQVERAYSFDDFVFHMQSGGHVGALHFHRDHRYFARVDIENFFYGIARNRVQGALSDLGIRRARHYAKWSCVKNPYGHPTYALPYGFVQSPILASLVLMESGVGEFLREISTGSRVRPSVYMDDISLSADNFDDLTMVFDALQNIMAASGFQISVEKLRKPALAMDIFNCDIRQGHSEVLVERIAAFEASERTQPSKEAFARYCLGVEAGNS

SEQ ID NO: 1370 - protein, 250 aa, unidentified
  source 1..250: note = uncultivated organism;MG160-382 reverse transcriptase
MLPAILNYDQKFFDGKKWIFIPSERGERRAVQVLKFFERSVTFPDYFYHYKSGGHVAALHDHLQHDFFFRIDIQNFFYSIARNRVQRALASKGLKGAPTYAKWSTVRSPYDGGPRYVLPIGFRQSPHIASLVLMQSPVFDAIERARANGVLVSVYLDDIIGSHADQAVLTTAYEDIRQSCVDGNLVPNAQKLVPPSAAITAFNCDLSKGAVNVTPARIAKFFETPHDAHATDAFAAYVTRVARANEAPAG

SEQ ID NO: 1371 - protein, 256 aa, unidentified
  source 1..256: note = uncultivated organism;MG160-383 reverse transcriptase
MESRLPKKWETRFQLKPGTWVFVPTEEARELGYIIKELVEARWRPPKNYFHLTNGGHVHAIGAHVHNTTFAHLDIQDFFGHVNASRVTRWLKPLVGYSKAREFAKASTVAHPSHGGIMLPFGFVQSPILASLCLFHSALGRCLVELPRKLGIVVSVYMDDIILSAADHSVLVHAVKLVDESAVRSGLPIHPDKREGPAPNITAFNIALAHQSLRVKDERWNSFLSDFQASDNEFVRRGIHSYVRSVNLEQANNLGA

SEQ ID NO: 1372 - protein, 250 aa, unidentified
  source 1..250: note = uncultivated organism;MG160-384 reverse transcriptase
MVQKWVSRFEIRPGVYVFVPTEETTEIGKEIKRLVEARWHAPRNYYHLRAGGHVRALRVHTGNTVFARLDIEGFFASISRTRVTRELKGFFGYDRAREFANAATVPTPGKLATVLPFGFVTSPLLASLCLCQSALGRCLRELTPKYGVTVSVYVDDIVLSSNSQRDLEAALADIEVAAARSRFRLSDVKREGPAASITAFNIELTNQSLRIEPRRWTQFINTYSTATSDAVRDGVSGYVRTVNGMQASML

SEQ ID NO: 1373 - protein, 253 aa, unidentified
  source 1..253: note = uncultivated organism;MG160-385 reverse transcriptase
MEMWKHKFEIKKNRWVHVPTKEMALFGKKLHQVIRIKWSSPDYYFHLRNGGHVSSAEMHKENEYFSLIDISNFFESTSQSRVTRELKKLFPYEKARKIAKRSTVRVPGSPLKKFSVPYGFPQSPILASLCLHNSFAGGVLDSICKSDNVLVSVYMDDIIFSSKDLAAINSAFDSFCTALEKSRYKINKDKTQLPSKKIAVFNLELSHDHLKVSSARMVQFVIAYAKSTNEYEREGIASYVRSVNAVQANRHFP

SEQ ID NO: 1374 - protein, 231 aa, unidentified
  source 1..231: note = uncultivated organism;MG160-386 reverse transcriptase
MPTPEAIERGLEIKALIEEKWSAPPFFYHLRHGGHVAALRAHTNNTLFFRADIDDFFGRIGRSRVTRCLKTYVPYAVARDIANLSLVKHPDHGRFILPYGFVQSPVLASLALDKSRLGKLLRRLSSAPQFAVSVYVDDIIVSSKSSVDLQQAAETLIDLASKALLPIGESKREGPSESVEAFNIQLSQDSLEITPERMDLFRSRYLIASSESVRAGIRGYVISVNPVQSDF

SEQ ID NO: 1375 - protein, 257 aa, unidentified
  source 1..257: note = uncultivated organism;MG160-387 reverse transcriptase
MDARWDSKFELKPGKWVFVPNNTAIELGREIKDDLQRRWKAPSYFYHLRDGGHVAALKSHLGQSRFIHVDIRDFFGSINRSRVTRALKGLYSYDEAREIANLSTVRHPEGRERRFILPYGFVQSTLLASVCLRKSALGNFLKRISVEDGVVVSVYVDDIVISLNEPERAEEIFGDLKKSAEKSGFDLNEDKEQRPAERINAFNIELSQNSLQILPERWLRFLDAMRETDNELRQLAILGYVDSVNPGQAAQLQVSAL

SEQ ID NO: 1376 - protein, 262 aa, unidentified
  source 1..262: note = uncultivated organism;MG160-388 reverse transcriptase
MDFVIAMEMWKHKFEVKKDRWVHVPTKEMSLFGKKLNKVIRSKWKAPVNYYHLRDGGHVASARVHIESEYFSLIDISNFFESTSQSRVTRELKKIIPYEKARLIAKLSTVRVPNSKDKKFSIPYGYPQSPVLASLCLNNSYAGRLLDTLSKSGIIKISVYMDDIIFSSKDLDALNEAFDEFSKALERSKYKINNDKTQRPAKKIVVFNLELSHDLLKVAPKRLVQFIQVYAQSQNEYEREGIAAYIHAVNPHQALLHFPKLS

SEQ ID NO: 1377 - protein, 258 aa, unidentified
  source 1..258: note = uncultivated organism;MG160-389 reverse transcriptase
MRNFDHKFPLKAGVMVYVQDAAQQADGYNLIDWIEGRWRAPRHFYHFRNGGHVAAARIHQSAPFILGLDLRRFFDQVTRTKVHRALRRIGYSSADAYEFACESTVTKDGKPGAYSLPFGFVQSMHLASLALHYSELGREMVRTRRAGVKLSNYVDDVLLSADTPDVLIEACDRIFKCAEVAGFGFNPDKERGPADQIEAFNIRIGRGELRVAEGRLNEFRQTVLEPPDDPALATIAYVRTVNPTQADDLSDVRKTAGL

SEQ ID NO: 1378 - protein, 181 aa, unidentified
  source 1..181: note = uncultivated organism;MG160-390 reverse transcriptase
MVLALENFAYQYKKNGKPVFAPNKKGREIGYKAKDLVEAAVTFDPFIYHLSEGTHIRALHDHRKNQYFCRVDIERFFYSISRNRVKRALKEIRIHDAERFARWSTVKNPYPGGGYVLPYGFVQSPILATLVLSSSAVGEYLRSLGEAITASVYMDDVCLSSNSLETLEADFEGLKTAMGEA

SEQ ID NO: 1379 - protein, 247 aa, unidentified
  source 1..247: note = uncultivated organism;MG160-391 reverse transcriptase
MIENYIHKYKSRNKFIYTPSAECKRRADRLLKWGEEIELPSYFFHYRDGGHVSALHEHLKNKYFFRIDLKNFFYSISRNRVARILRQCGFRCAREYSEWSTVKTPYPDGPRYVLPIGFKQSPLLASLALWRSSVASAIEDALDRDVFVSVYFDDLIGSSNDENELRTTYEGILAACVQANLVTNAEKLIPPADAITAFNCHLRHGHADVTDDRIQKFIDEERGAIAEASFIDYCIRVARNNHASEPR

SEQ ID NO: 1380 - protein, 244 aa, unidentified
  source 1..244: note = uncultivated organism;MG160-392 reverse transcriptase
MIINYDFKYRSRGKWFFVPNEKCERRGRRMLAFFKERVAFLDYMYHFKKGGHVAALHAHLNNKLFFKIDIQNFYYSIARMRVTRALRHWGYPGAGTFSMWSCVKNPLPGPPHALPIGFVQSPLLASLVLMKSEVADAIDRAIAKGVCISVYLDDFIGSHDDLAVLTEAYEDIRNTCVTAGLVPNLRKLVAPSAAITAFNCDLKQGSALVTPARVAEYFARTDRTPLSDAGFVQYEGLVSSQNVP

SEQ ID NO: 1381 - protein, 256 aa, unidentified
  source 1..256: note = uncultivated organism;MG160-393 reverse transcriptase
MEMWKHKFEVKKDRWVHVPTKEMSIFGKKLNKILRSKWKSPDYFYHLKNGGHVSSARIHIENEYFSLVDISNFFESTSQSRVTRELKTIIPYEKARLIAKASTVRLANRKEKKFSIPYGYPQSPILASLCLNNSFAGRALDLIIKRGDVLVSVYMDDIIFSSNNLNSITESFDLFCIALEKSKYKINKNKTQRPSKQLAVFNLELSHHHLRVAPERMVQFIQAYAQSENEHECEGIAAYVRSVNSNQALLHFPRKD

SEQ ID NO: 1382 - protein, 256 aa, unidentified
  source 1..256: note = uncultivated organism;MG160-394 reverse transcriptase
MLDNYNHKFTLPKGHQVFVPSWRSRRDGALIQRLVHRRWRTPSYFYHLRSGGHVAAARRHLSSTIFVRLDISRFYDSITRAKIHRALRVLGVDHAAAWNIARESTVEKTSGAGDFSVPYGFVQSPILSSIALDRSALGRAMKGINSGRSGVLISDFVDDVILSGTALSAVEDARSALIDAAYTSGFEFNSKAEGPAPEITVFNLVLSNGTLVVSDAKMAEFEVEVRKGDPAVSTGIITYVWTVNPAQADYLRTKLP

SEQ ID NO: 1383 - protein, 251 aa, unidentified
  source 1..251: note = uncultivated organism;MG160-395 reverse transcriptase
MTQKWTHCYQLKPSRWVFAPTDEARKTGQRIKGAVEAHWRPPHFYFHLRKGGHVAAVRSHMPSKFFFRADIDDFFGRVSRSRITRCLKSWFSYADAREMASESVVKRPGLEGFVLPYGFVQSPILASLALEKSALGAYLRKLSSRGDLRVSVYVDDIIISGDNESVLGEVGERLIDLASKALFPVSREKREGPAEEVTAFNIRVSRAALRITDERMAELRLSYQSATSEFSRAGILGYVDSVSPAQADSLR

SEQ ID NO: 1384 - protein, 256 aa, unidentified
  source 1..256: note = uncultivated organism;MG160-396 reverse transcriptase
MPKTYELRYQRAPGKWVYVPTQASKIRGYQIIGRVTKTYSPHSIFFHLGARGGHVAALRRHLDSRYFSRLDLANFFGNVTRTKTCEALEDIGFGNRQAFDWAVQSSVVEDARKILPQGFPQSPLLATLVLERSALGRALIRLSNTVVVTVYMDDVVLSGTEAAAVLHASDEVLEAAAVSNLPIAQNKVALAQGSVEAFNCDLTHRHMKISNPRLDRFASQWTAGNAAAQEAIGRYLSAINEGDIQRLAALVNVPTG

SEQ ID NO: 1385 - protein, 253 aa, unidentified
  source 1..253: note = uncultivated organism;MG160-397 reverse transcriptase
MAFNYEYRFEIKPDRWVYIQTEDAKKRAESFIKTIRKNYTPNEIFYGMRRHGGHVSALHAHRGNLYYSRFDIDSFFWRITRSRIVRALRSIGIQKDKAFNIAYASVVQDGDRKHLPFGFRQSPLIATLALEKSLLGKKLISIKNSGICVTAYVDDIIISSNSLEDISVATDEVIIASKQAELPLSAEKMSKSMGEITAFNCNLAKLGPRITEERLAEFVDQMNSGSPESIRSILNYISAISADDIERLTKKIH

SEQ ID NO: 1386 - protein, 277 aa, unidentified
  source 1..277: note = uncultivated organism;MG160-398 reverse transcriptase
MGNTERLEKLLIEYPADARVHQTLVPKSNGTSRPIITPNKPLNKWLKLVKRELRQLRKDWPTFIHGGVKKRSYVSFVRPHTNKKTVITIDIHECFSSITQDKVQTALISKLSLDAELAQRLSKKLCYKGHLPQGFATSSYLANLCLNDTLLIIKRKANRLGASVTVYVDDIALSGQRVNPGELINVITTELSRANLLVKKAKIKVMQSHQPQIICGLTVNRGVMLTRQKRKELFASIANGSMSEISLRGWLANLNMLDKKLMQKLEAYAIKKGVISN

SEQ ID NO: 1387 - protein, 287 aa, unidentified
  source 1..287: note = uncultivated organism;MG160-399 reverse transcriptase
MLRSISTARLSTMPLAFENFLYSYKKNGKPIYAPNPFGEKLGAELKRRVNKAYKFDSFVYHFKDGSHVLALHRHRNNQFFCRIDISKFFYSIQRNRVKRALKDIHVQRPEYYAKWSTVKNPYGAGYVLPYGFVQSPILATLVISKSPIGVYLRGLPASVTVSVYMDDICLSGNDEAELQTAFDGLVAAVAEAGFTLNDEKTRPPAAQIDIFNCSLTNGKTEVLQDRVDEFFAVDRSPASEEGFKTYCDIVESKTWRTGHKKKRRTAYFRSLPKPAPVAPAAPEPPTT

SEQ ID NO: 1388 - protein, 287 aa, unidentified
  source 1..287: note = uncultivated organism;MG160-400 reverse transcriptase
MLRSISTARLSTMPLAFENFLYSYKKNGKPIYAPNPFGEKLGAELKRKVNKAYKFDSFVYHFKDGSHVLALHRHRNNQFFCRIDISKFFYSIQRNRVKRALKDIHVQRPEYYAKWSTVKNPYGAGYVLPYGFVQSPILATLVLAKSAIGIYLRGLPATITVSVYMDDICLSGNGEADLQTAFEGLIAAVAEAGFTLNDEKTRPPAPQIDIFNCSLANGKTEVLQDRIDEFFSEEHSAASEEGFKIYCDIVESKTWRTGHKKKRRTAYFRSLPKPAPVAPAASAPSTT

SEQ ID NO: 1389 - protein, 243 aa, unidentified
  source 1..243: note = uncultivated organism;MG160-401 reverse transcriptase
MIVNYEFKYHSRGKWFFVPNDKCERRGRRMLAYFKRRVAFPEYMYHFRKGGHVAALHAHLNNHFFFKIDIQNFYYSIARMRVTRALRQWGYPGANTFAIWSCVRNPLPGPKHALPIGFVQSPLLASLALMKSEVAQAIERAIAKGVCISVYLDDFIGSHDDEAVLTAAYQDIRNTCVAAGFIPNPGKLVPPQAAITAFNCDLTNGSAEVTGARVAKYMSRTDRTALSDAGFNEYRDLVRSQNV

SEQ ID NO: 1390 - protein, 245 aa, unidentified
  source 1..245: note = uncultivated organism;MG160-402 reverse transcriptase
MPVAIPNFDYSYLRKGKPVFVPTKTGRRIGAEIKEAVERAYTFDPIYFHLRRGGHVAAMHHHRESHTFARIDISNFFYSISRRRVQSALDRIGVGNARFYAKWSTVLSPFGNPRYALPYGFVQSPILASLVIATSDLGQHLVGLPASVKSGVYVDDISLSSDDANELQHAYEETLAAIAADGFAVSPGKLRSPAPAIDIFNCDLAHGKANVTDNRINAFLSSNPSQAAEDAFVAYCASVEMGNQA

SEQ ID NO: 1391 - protein, 257 aa, unidentified
  source 1..257: note = uncultivated organism;MG160-403 reverse transcriptase
MHPHERWRSKFKIKECTWVFVPTDETIATGLQVKELIEGYWSAPDHYYHLRKGGHVLALQKHTKHKFFIHLDIQNFFGQINKSRVTRCLKEHIPYESAREIAVESTVRLPESAETKFILPFGFVQSPIIASLCLSKSALGRYLYRLEQRKGLDVSVYMDDILISGDNIEELEQELVKIKAAAEKSGLPLNPLKQEGPDTCVSAFNIRLSQGLLKIIPSKLQELANTYSSSTNEHQRAGILNYVLSINLAQAELFLYI

SEQ ID NO: 1392 - protein, 328 aa, unidentified
  source 1..328: note = uncultivated organism;MG160-404 reverse transcriptase
MVNEKHWVYRTVIFPRVFTEKSLLYLVGTKRREFLELTENKSLFYKIDKEPKKSGGFRDIYKPHWRLKILLRKINSRVLSRLNFPDFVHCGPSGKSIITATRGHNKFKFHISLDIKSFFDQVSKETTSGILRKIGINKEITATIVRAAVEHDRLPQGFPTSPLLATLVVSYVLQDFYSSFVRKEILISVYADDILISSNYKEMLWEAKKYVESELNNVGLSLNTKECFAKNGERFTWLSLQVYPWVTLPRKELLLLEKVIYKYKETGIVPLDFKPKKIPREPYDIRELWEESVKGKVVFAKSVSHTKLADKTLKKLDSVKVSSMRKTA

SEQ ID NO: 1393 - protein, 290 aa, unidentified
  source 1..290: note = uncultivated organism;MG160-405 reverse transcriptase
MSIAPPKSIEELARRLEMDCVKLISISVKAPLLYGRKEIPREGKPPRIIEPPHKNLKELQRKLLDTTLIHLRCDDSLFARKGTNTVDAVIPHISKPILITMDIKNFFPSVSHFQVKTALKSRGIPDDVAKLITRLTTHRHHLPQGAPTSVELGRLVMHPVALEVKRALDATGTNYAFSMYVDDVIISGPVGLKRMIGIIYKIYERHGFNLDKSIKMRTMRLGKDVQEALGIRIDRGIEPGEAIRLKLAHANSNSKEHKGLRSYASHLQNRNKKYSERKKCNVGGRCKLCH

SEQ ID NO: 1394 - protein, 313 aa, unidentified
  source 1..313: note = uncultivated organism;MG160-406 reverse transcriptase
MSWRYCSSKSFPKIFTQKSFLFLIHVKRRNFVKLSEEKSFHYKKTKKLKRDGIKYREIYKPDRELKFILKKINRKYLSKFDFPPFVHCGPRGKSIVTAAQGHTEFSHHVSLDIESFFDRVTKKVTEETLIKIGVNKNIVELISGIAIEDNRIPQGFPTSSSLSALVVSFVLQDFCLHFNKGEIIFSLYADDILISSNNESLLKLAEKFIDKQLWSIGLSLNSKKEVGKKGKKFKWLGLQIHPWISLPRKTMVDLQKRVYEYKTNGIIPEDFKPKKRGQIKKQWEQSVKGKIVFAQSVSENKLLEKILKKISDT

SEQ ID NO: 1395 - protein, 244 aa, unidentified
  source 1..244: note = uncultivated organism;MG160-407 reverse transcriptase
MFQNYKWTWKRNGKIIFAPTKDTDRRGDQIIEFCDREVEFPVCFYHYRKGGHVVALHGHLQNRLFFKIDIQNFFYSISRNRIAAALHHARFPWARTFAKWSSVKNPYPVGSRYVLPIGFKQSPALASLVVMRSPLMAMVDRAERAGAFVSIYLDDLICSANDETLLQELYDGFLQACEDANLTPNPTKLVAPTSEIVVFNCELRHGFAQVTPERIAKYFEEPRTAASQRSFDVYCAKVSEANTV

SEQ ID NO: 1396 - protein, 228 aa, unidentified
  source 1..228: note = uncultivated organism;MG160-408 reverse transcriptase
MHCGPRGKSIVTAAQGHTEFSHHVSLDIESFFDRVTKKVTEETLIKIGVNKNIVELISGIAIEDNRIPQGFPTSSSLSALVVSFVLQDFCLHFNKGEIIFSLYADDILISSNNESLLKLAEKFIDKQLWSIGLSLNSKKEVGKKGKKFKWLGLQIHPWISLPRKTMVDLQKRVYEYKTNGIIPEDFKPKKRGQIKKQWEQSVKGKIVFAQSVSENKLLEKILKKISDT

SEQ ID NO: 1397 - protein, 288 aa, unidentified
  source 1..288: note = uncultivated organism;MG160-409 reverse transcriptase
MLRENPNGRQCLDMKDLRELTESSLSKTLKISADKLRSLSQKAPLLYRERKESKKSGGLRLIEAPHENLKSTQRNLLHGILDHLPLSDSFFGRAGSSAIQAAQLHVNKPMVVTMDIKDFFPSVSSKMVYGMFRRRGASQVVAKILTRLVTRKSHLPQGAPTSSCVAALVLSPAIHDIERAIKSIGVSSFSVYVDDVALSGPVGLKRIKETVVSIFERHGFRVHPAKIRVMPKGMNQEVLGLAVNRGLEVSQSFQAEYEQKVNELGPSHPTVKGKRNYIDSVAKTHKSA

SEQ ID NO: 1398 - protein, 244 aa, unidentified
  source 1..244: note = uncultivated organism;MG160-410 reverse transcriptase
MFQNYKWTWKRNGKIIFAPTKDTDRRGDQIIEFCDRAVEFPACFYHYRKGGHVVALHGHLQNRLFFKIDIQNFFYSISRNRIAAALHHAGFPWARTFAKWSSVKNPYPVGSRYVLPIGFKQSPALASLVMMRSPLMAMVDRAERAGAFVSIYLDDLICSANDEALLQELYDGFLQACEDANLTPNPTKLVAPTSEIVVFNCELRHGFAQVTPERIAKYFEEPRTAASQRSFDLYCAKVSEANTV

SEQ ID NO: 1399 - protein, 412 aa, unidentified
  source 1..412: note = uncultivated organism;MG160-411 reverse transcriptase
MTNSAGNQPRQNRDIQAILRPIVKRLGNCHEGVILKNASRALKNGDSCSTIRFIRMCLKSPNLFQGEILQLKYIVQLLQRRKIISWIDSSLVDMLYWLYLIPPEYKIQVFVMLWKLLQDTLSVYSILSSKYTMNLETYTLNDLADLLSFDSPEELRLLAMRAEKEYGFIKKWKDEDNHEKGYRIINPPSDGLKAIQQKLLNTLLYSIPTPDYMGGGKGSSTKELMKKHMNKAMLICFDISDFFPSVKSQFVYKALRSRGVSKDVAEVLTQLTTYRGHLPQGGPCSTQLAKIVVMTPAKHLQQHLTNCFGQGFEVSFWVDDIVISGPISLGDLIKRKTIYAIFKRYGFVLKKEKTRKASKTEEQTALGIRVDHHRMRPCSTFMERYKKALHDEGVNSLKVQGMQQFIRHVSIR

SEQ ID NO: 1400 - protein, 412 aa, unidentified
  source 1..412: note = uncultivated organism;MG160-412 reverse transcriptase
MTNSAVNQPRQNRDIQAILRPIVKRLGNCQEGVILKNASRALKNGDSCSTIRFIRMCLKSPNLFQGEILQLKYIVQLLQRRKIISWIDSSLVDMLYWLYLIPPEYKIQVFVMLWKLLQDTLSVYSILSSKYTMNLETYTLNDLADLLSFDSPEELRLFAMRAEKEYGFIKKWKDEDNHEKGYRIINPPSDGLKAIQQKMLNTLLYSIPTPDYMGGGKGSSTKELMKKHMNKAMLICFDISDFFPSVKSQFVYKALRSRGISKDVAEVLTQLTTYRGHLPQGGPCSTQLAKIVVMTPAKHLQQHLTNCFGQGFEVSFWVDDIVISGPISLGDLIKRKTIYAIFKRYGFVLKKEKTRKASKTEEQTALGIRVDHHRMRPCSTFMERYKKALHDEGVNSLKVQGMQQFIRHVSIR

SEQ ID NO: 1401 - protein, 412 aa, unidentified
  source 1..412: note = uncultivated organism;MG160-413 reverse transcriptase
MTNSAGNQPRQNRDIQAILRPIVKRLGNCQEGVILKNASRALKNGDSYSTIRFIRMCLKYPNLFQGEIIQLKYIVQLLQRRKTISWIDSSLVDMLYWLYLIPPEYKIQVFVMLWKLLQDTLSVYSILSSKYTMNLETYTLNDLADLLSFDSPEELRLLAMRAEKEYGFIKKWKDEDNHEKGYRIINPPSDGLKAIQQKLLNTLLYSIPTPDYMGGGKGSSTKELMKKHMNKAMLICFDISDFFPSVKSQFVYKALRSRGVSKDVAEVLTQLTTYRGHLPQGGPCSTQLAKIVVMTPAKHLQQHLTNCFGQGFEVSFWVDDIVISGPISLGDLIKRKTIYAIFKRYGFVLKKEKTRKASKTEEQTALGIRVDHHRMRPCGTFMERYKKALHDEGVDSLKVQGMQQFIRHVSIR

SEQ ID NO: 1402 - protein, 412 aa, unidentified
  source 1..412: note = uncultivated organism;MG160-414 reverse transcriptase
MTNSAVNQPRQNRDIQAILRPIVKRLGNCQEGVILKNASRALKNGDSCSTIRFIRMCLKSPNLFQGEILQLKYIVQLLQRRKIISWIDSSLVDMLYWLYLIPPEYKIQVFVMLWKLLQDTLSVYSILSSKYTMNLETYTLNDLADLLSFDSPEELRLLAMRAEKEYGFIKKWKDEDNHEKGYRIINPPSDGLKAIQQKMLNTLLYSIPTPDYMGGGKGSSTKELMKKHMNKAMLICFDISDFFPSVKSQFVYKALRSRGISKDVAEVLTQLTTYRGHLPQGGPCSTQLAKIVVMTPAKHLQQHLTNCFGQGFEVSFWVDDIVISGPISLGDLIKRKTIYAIFKRYGFVLKKEKTRKASKTEEQTALGIRVDHHRMRPCSTFMERYKKALHDEGVNSLKVQGMQQFIRHVSIR

SEQ ID NO: 1403 - protein, 412 aa, unidentified
  source 1..412: note = uncultivated organism;MG160-415 reverse transcriptase
MTNSAVNQPRQNRDIQAILRPIVKRLGNCQEGVILKNASRALKNGDSCSTIRFIRMCLKSPNLFQGEILQLKYIVQLLQRRKIISWIDSSLVDMLYWLYLIPPEYKIQVFVMLWKLLQDTLSVYSILSSKYTMNLETYTLNDLADLLSFDSPEELRLFAMRAEKEYGFIKKWKDEDNHEKGYRIINPPSDGLKAIQQKLLNTLLYSIPTPDYMGGGKGSSTKELMKKHMNKAMLICFDISDFFPSVKSQFVYKALRSRGISKDVAEVLTQLTTYRGHLPQGGPCSTQLAKIVVMTPAKHLQQHLTNCFGQGFEVSFWVDDIVISGPISLGDLIKRKTIYAIFKRYGFVLKKEKTRKASKTEEQTALGIRVDHHRMRPCSTFMERYKKALHDEGVNSLKVQGMQQFIRHVSIR

SEQ ID NO: 1404 - protein, 256 aa, unidentified
  source 1..256: note = uncultivated organism;MG160-416 reverse transcriptase
MPKRLWVDKFEIKPNKWVFVQSLEHKKRGLALVAGLARRWSPPSFYYHFREGGHVAALKSHKRHQYFFYIDIRDFFGSINKTRITRILKKHMKYDAARSVANFSTVKIKSNSEEKYVLPFGFTQSPFLSAMCLDDSQLGRLLREYSVLSSSGSLNVSVYMDDIILSSSNLKYLTDAGQSILTAVNRSGFEIKDIGDADVKELVEVFNVRLSQGLLEITQEKMHDFSMRYAVSSNENEQLGIYNYVKSINPAQAALL

SEQ ID NO: 1405 - protein, 236 aa, unidentified
  source 1..236: note = uncultivated organism;MG160-417 reverse transcriptase
MPTQEGRGRGREIKAAIEEVWTPPSYYYHLRPGGHVAAVREHFASPWVASVDLQRFFDQISRSRVARCLKKIGFGNDVAWEMACDSVVDKRPPQREFSVPFGFIQSPIIASLVLSNSILGRLIDKFRTNGVAITVYVDDISISEANEGALRDIVAQLDDAARLSGFKFNPQKIQKPARTATSFNIEFGSGKMRIVEDRLSQFEISLRMANEPKIEGILAYVAPVSNDDLDRLANFV

SEQ ID NO: 1406 - protein, 242 aa, unidentified
  source 1..242: note = uncultivated organism;MG160-418 reverse transcriptase
MKPGRWVYVPTPLGRARGEEIRKQVSSVWKPPAFYFHLRQGGHVAALQSHVGNRYFFRGDIQDFFGRVNRSRVTRGLKKYFSYAKAREMAGDSVVVSPTSGNTMLPFGFVQSPLLASLVLDESRVGRWLAKSAGRPGLKVSVYVDDILLSSHDKEFLRANVLELEALAGAAGLPLNALKSEGPADLVTAFNIELTNGNLAITPERIEFFREAYSSAVSSKVEDGILGYVASVNPTQVASVTV

SEQ ID NO: 1407 - protein, 253 aa, unidentified
  source 1..253: note = uncultivated organism;MG160-419 reverse transcriptase
MSHINYEYRYEIKPGRFVYVQTRSSAISGRAIIKQVSRKYKPSRIFYHFRRMGGHVAALRLHQGSLFFSRFDIENFFGQVARSRIARSLRQVGIAHRRAFNIAVESVVVEGANKVLPFGFCQSPVLATVALEFSMLGSTLKRLSAAGFRVSVYVDDIIISGNDQAALHAASLELIDAASLSKFPLSTSKRTIAASAVEAFNCQIDSHTITILDDRMDRFVSDHRDCTPWAQGAIEKYVNAISPAELVRLNSLL

SEQ ID NO: 1408 - protein, 259 aa, unidentified
  source 1..259: note = uncultivated organism;MG160-420 reverse transcriptase
MKNYSSKILLGADKFAYEQVPSFKLLDEALSSRIYDARQPPSIFYHHRNGGHIAVLDKHLQSDTFSRFDISQFFNRVTKNKIIKALKTCGFSLIKASEATAHSVLKTEVGFHLPYGFTQSPALASLCLNRSQAGKFLGKLDKDILVSVYVDDIILSHKNDPIKLRKVSESLIETFTSVGFPISETRSVIAQPTITAFNIELHNNSMALTPERLIGFHNQVIAGWQSDDVLVGVYNYVLSVNAAQGAEIEHAISRMQSHR

SEQ ID NO: 1409 - protein, 259 aa, unidentified
  source 1..259: note = uncultivated organism;MG160-421 reverse transcriptase
MKNYSSKIPLGADKFAYEQVPSFKLLDEALSSRIYDARQPPSIFYHHRNGGHIAVLDKHLQSDTFSRFDISQFFNRVTKNKIIKALKTCGFSLIKASEATAHSVVKTEAGFHLPYGFTQSPALASLCLNRSQAGKFLGELDKDILVSVYVDDIILSHKNDPIKLRKVSKSLIETFTSVGFPISETRSVIAQPTITAFNIELHNNSMALTPERLIGFHNQVIAGWQSDDVLVGIYNYVLSVNAAQGAEIEHAISRMQSHR

SEQ ID NO: 1410 - protein, 259 aa, unidentified
  source 1..259: note = uncultivated organism;MG160-422 reverse transcriptase
MKNYSSKILLGADKFAYEQVPSFKLLDEALSSRIYDARQPPSIFYHHRNGGHIAVLDKHLQSDTFSRFDISQFFNRVTKNKIIKALKTCGFSLIKASEATAHSVLKTEVGFHLPYGFTQSPALASLCLNRSQAGKFLGKLDKDILVSVYVDDIILSHKNDPIKLRKVSESLIETFTSVGFPISETRSVIAQPTITAFNIELHNNSMALTPERLIGFHNQVIAGWQSDDVLVGVYNYVLSVNAAQGAEIEHAISRMQSRR

SEQ ID NO: 1411 - protein, 266 aa, unidentified
  source 1..266: note = uncultivated organism;MG160-423 reverse transcriptase
MTELPQTKSALIQLLQVETDTFEEVLSQAPRFYRCRWERKPAGGRRRIEEPGSSLKEIQRCLNHRLFQKLDGLPNVYPQKGTSHKDALKPHESQPVVVTLDIKDFFPSIRRHRLKQLFLRKGFCAEISNHLLRLVTYRGHLPQGAPSSSAIARLYILDLVSDLEKYLKDIPSLRITVFADDIVISGPEGTQRTIPGLMRLAPRYGLKINKRKIKVMRGQEQKALGVCMFPHLHLDKEFSDEAERLRDQGNKRSYQGKMAYKKFIER

SEQ ID NO: 1412 - protein, 254 aa, unidentified
  source 1..254: note = uncultivated organism;MG160-424 reverse transcriptase
MYDMNQRWKHKFEIKPGKWVHVPADGEIEYGTKLNKQLQKRFPFPNLYWHLKCGGHVKALNEHTESKYFASLDLGGFFTSITRNRVTRSLKGRYSYQQARDIATRSTVWTPDQNKYVLPFGFVQSTLLATICLNQSTLGSVLQAISNTPNLAVSVYVDDIIVSGLTIGSVLSAFDRLKLAVTRSNFNINNDKLQEVSESIEAFNIRLTHNELLITDKRMIQFQDAYASATSKYSQEGILTYISSVNPLQSNLMK

SEQ ID NO: 1413 - protein, 259 aa, unidentified
  source 1..259: note = uncultivated organism;MG160-425 reverse transcriptase
MKNYSSKIPLGADKFAYEQVPSFKLLGEALSSRIYDAWQPPSIFYHHRNEGHIAVLDKHLQTDTFSSFDISQFFNRVTKNKIIKALKTCGFSLIKASESTAHSVVKTEAGFHLPYGFTQSPALASLCLNRSQAGKFLGELDKDILVSVYVDDIILSHKNDPIKLRKVSESLIETFTSVGFPISETRSVIAQPTITAFNIELHNNSMALTPERLIGFHNQVIAGWQSDDVLVGIYNYVLSVNAAQGAEIEHAISRMQSHR

SEQ ID NO: 1414 - protein, 276 aa, unidentified
  source 1..276: note = uncultivated organism;MG160-426 reverse transcriptase
MKNYSSKIPLGADKFAYEQVPSFKLLGEALSSRIYDAWQPPSIFYHHRNGGHIAALDKHLQSDTFSRFDISQFFNRVTKNKIIKALKTCGFSFIEASEAAAHSVVKTEAGFHLPYGFTQSPALASLCLNRSQAGKFLGKLDKDILVSVYVDDIILSHKNDPIKLRKVSESLIETFTSVGFPISETRSVIAQPTITAFNIELHNNSMALTPERLIGFHNQVIAGWQSDDVLVGIYNYVLSVNAAQGAEIEHAISRMQSRRQTTTSTSSCSPTPNTRL

SEQ ID NO: 1415 - protein, 185 aa, unidentified
  source 1..185: note = uncultivated organism;MG160-427 reverse transcriptase
MKNYSSKIPLGADKFAYEQVPSFKLLGEALSSRIYDAWQPPSIFYHHRNGGHIAALDKHLQSDTFSRFDISQFFNRVTKNKIIKALKTCGFSFIEASEAAAHSVVKTEAGFHLPCGFTQSPALASLCLNRSQAGKFLGKLDKDILVSVYVDDIILSHKNDPIKLWKVSKSLIKTFTSVGFQNFRN

SEQ ID NO: 1416 - protein, 185 aa, unidentified
  source 1..185: note = uncultivated organism;MG160-428 reverse transcriptase
MKNYSSKIPLGADKFAYEQVPSFKLLGEALSSRIYDAWQPPSIFYHHRNGGHIAALDKHLQSDTFSRFDISQFFNRVTKNKIIKALKTCGFSFIEASEAAAHSVVKTEAGFHLPYGFTQSPALASLCLNRSQAGKFLGKLDKDILVSVYVDDIILSHKNDPIKLRKVSKSLIETFTSVGFPNFRN

SEQ ID NO: 1417 - protein, 185 aa, unidentified
  source 1..185: note = uncultivated organism;MG160-429 reverse transcriptase
MKNYSSKIPLGADKFAYEQVPSFKLLGEALNSRIYDAWQPPSIFYHHRNEGHIAVLDKHLQTDTFSRFDISQFFNRVTKNKIIKALKTCGFSLIEASKPTAHSVVKTEARFYLPYGFTQSPALASLCLNRSQAGKFLGKLDKDILVSVYVDDIILSHKNDPIKLRKVSKSLIETFTSVGFPNFRN

SEQ ID NO: 1418 - protein, 259 aa, unidentified
  source 1..259: note = uncultivated organism;MG160-430 reverse transcriptase
MKNYSSKIPLGADKFAYEQVPSFKLLGEALSSRIYDAWQPPSIFYHHRNGGHIAVLDKHLQSDTFSRFNISQFFNRVTKNKIIKALKTCGFSFIEASEAAAHSVVKTEAGFHLPCGFTQSPALASLCLNRSQAGKFLGKLDKDILVSVYVDDIILSHKNDPIKLRKVSENLIETFTSVGFPIAETKSVIAQPTITAFNIELHNNSMALTPERLIGFHNQVIAGWQSDDVLVGIHNYVLSVDAAQGAEIEHAISRMQSRR

SEQ ID NO: 1419 - protein, 259 aa, unidentified
  source 1..259: note = uncultivated organism;MG160-431 reverse transcriptase
MKNYSSKIPLGADKFAYEQVPSFKLLGEALSSRIYDAWQPPSIFYHHRNGGHIAVLDKHLQSDTFSRFNISQFFNRVTKNKIIKALKTCGFSFIEASEATAHSVVKTEARFHLPYWFTQSPALASLCLNRSQAGKFLGELDKDILVSVYVDDIILSHKNDPIKLRKVSKSLIETFTSVGFPISETRSVIAQPTITAFNIELHNNSMALTPERLIGFHNQVIAGWQSDDVLVGIYNYVLSVNAAQGAEIEHAISRMQSHR

SEQ ID NO: 1420 - protein, 259 aa, unidentified
  source 1..259: note = uncultivated organism;MG160-432 reverse transcriptase
MKNYSSKIPLGADKFAYEQVPSFKLLGEALSSRIYDAWQPPSIFYHHRNGGHIAALDKHLQSDTFSRFDISQFFNRVTKNKIIKALKTCGFSFIEASEAAAHSVVKTEAGFHLPCGFTQSPALASLCLNRSQAGKFLGKLDKDILVSVYVDDIIFSHKNDPIKLRKVSENLIETFTSVGFPIAETKSVIAQPTITAFNIELHNNSMALTPERLIGFHNQVIAGWQSDDVLVGIHNYVLSVNAAQGAEIEQAISRMQSRR

SEQ ID NO: 1421 - protein, 259 aa, unidentified
  source 1..259: note = uncultivated organism;MG160-433 reverse transcriptase
MKNYSSKIPLGADKFAYEQVPSFKLLGEAFSSRIYVAWQPPSIFYHHRNGGHIAVLDKHLQSDTFSRFDISPFFNRVTKNKIIKALKTCGFSLIEASEPTAHSVVKTEARFHLPYGFTQSPALASLCLNQSQAGKFLGKLDNAILVSVYVDDIILSHKNDPIKLRKVSKSLIETFTSVGSPISETRSVIAQPTITAFNIELHNNSMALTPERLIGFHNQVIAGWQSDDVLVGIHNYVLSVDAAQGAEIEHAISRMQSRR

SEQ ID NO: 1422 - protein, 227 aa, unidentified
  source 1..227: note = uncultivated organism;MG160-434 reverse transcriptase
MEKFILYVRLFREVVLTSVLVIKLIKLIHDFVIPALNYVTRCFENYSSKVPLGADKFAYEQVPSFKLLGEALSSRIYDAWQPPSIFYHHRNGGHIAALDKHLQSDTFSRFDISQFFNRVTKNKIIKALKTCGFSFIEASEAAAHSVVKTEAGFHLPYGFTQSPALASLCLNRSQAGKFLGKLDKDILVSVYVDDIILSHKNDPIKLRKVSKSLIETFTSVGFPNFRN

SEQ ID NO: 1423 - protein, 259 aa, unidentified
  source 1..259: note = uncultivated organism;MG160-435 reverse transcriptase
MKNYSSKVPLGADKFAYEQVPSFKLLGEALSSRIYDAWQPPSIFYHHRNGGHIAALDKHLQSDTFSRFDISQFFNRVTKNKIIKALKTCGFSLIEASEATAHSVVKTEARFHLPYGFTQSPALASLCLNRSQAGKFLGKLDKDILVSVYVDDIILSHKNDPIKLRKVSENLIETFTSVGFPIAETKSVIAQPTITAFNIELHNNSMALTPERLIGFHNQVIADWQSDDVLVSIYNYVLSVNAAQGAEIEHAISRMQSHR

SEQ ID NO: 1424 - protein, 185 aa, unidentified
  source 1..185: note = uncultivated organism;MG160-436 reverse transcriptase
MKNYSSKIPLGADKFAYEQVPSFKLLGEALSSRIYDAWQPPSIFYHHRNEGHIAVLDKNLQTDTFSRFDISQFFNRVTKNKIIKALKTCGFSLIKASESTAHSVVKTEAGFHLPYGFTQSPALASLCLNRSQAGKFLGELDKDILVSVYVDDIILSHKNDPIKLRKVSKSLIETFTSVGFPNFRN

SEQ ID NO: 1425 - protein, 259 aa, unidentified
  source 1..259: note = uncultivated organism;MG160-437 reverse transcriptase
MKNYSSKIPLGADKFAYEQVPSFKLLGEALSSRIYDAWQPPSIFYHHRNGGHIAALDKHLQSDTFSRFDISQFFNRVTKNKIIKALKTCGFSFIEASEATAHSVVKTEARFHLPYWFTQSPALASLCLNQSQAGKFLGKLDNAILVSVYVDDIILSHKNDPIKLRKVSKSLIETFTSVGSPISETRSVIAQPTITAFNIELHNNSMALTPERLIGFHNQVIAGWQSDDVLVGIHNYVLSVNTAQGAEIEHAISRMQSRR

SEQ ID NO: 1426 - protein, 255 aa, unidentified
  source 1..255: note = uncultivated organism;MG160-438 reverse transcriptase
MKNYLSKIPLGNNKFAYEQVPEFKESGLLYKAKIEGRWTAPEHFYHLKDGGHVAALTKHLQNDMFSKIDLSRFFYRVTKNKIIRSLKRTGLPFQECLEIAADSVVKTENCFSLLYGFVQSPLLASIALHFSGLGKFLTELPSEILVSVYVDDIILSSNGNRELLQDKSSALLASASKAGFPTNSEKCELVSSQIETFNVKLSNQNLWLTDDRMVEFHGFLRAAPSDTQIQGVLGYVGQINQDQMADLGKTAAKYK

SEQ ID NO: 1427 - protein, 185 aa, unidentified
  source 1..185: note = uncultivated organism;MG160-439 reverse transcriptase
MKNYSSKIPLGADKFAYEQVPSFKLLGEALSSRIYDAWQPPSIFYHHRNEGHIAVLDKNLQTDTFSRFDISQFFNRVTKNKIIKALKTCGFSFIEASEATAHSVVKTEARFHLPYGFTQSPALASLCLNRSQAGKFLGKLDKDILVSVYVDDIILSHKNDPIKLRKVSKSLIETFTSVGFPNFRN

SEQ ID NO: 1428 - protein, 221 aa, unidentified
  source 1..221: note = uncultivated organism;MG160-440 reverse transcriptase
MSACFAKLCWLQFLSLSWSSWLMTLWFRLLTMWANVLKNYSSKIPLGADKFAYEQVPSFKLLGEALSSRIYDAWQPPSIFYHHRNGGHIAALDKHLQSDTFSRFDISQFFNRVTKNKIIKALKTCWFSLIEASEATAHSVVKTEAGFHLPYGFTQSPALASLCLNRSQAGKFLGKLDKDILVSVYVDDIILSHKNDPIKLRKVSKSLIETFTSVGFPNFRN

SEQ ID NO: 1429 - protein, 259 aa, unidentified
  source 1..259: note = uncultivated organism;MG160-441 reverse transcriptase
MKNYSSKIPLGADKFAYEQVPSFKLLGEALSSRIYDAWQPPSIFYHHRNGGHIAALDKHLQSDTFSRFDISQFFNRVTKNKIIKALKTCGFSFIEASEAAAHSVVKTEAGFHLPCGFTQSPALASLCLNRSQAGKFLGKLDKDILVSVYVDDIIFSHKNDPIKLRKVSENLIETFTSVGFPIAETKSVIAQPTITAFNIELHNNSMALTPERLIGFHNQVIAGWQSDDVLVGIHNYVLSVNAAQGAEIEHAISRMQSRR

SEQ ID NO: 1430 - protein, 185 aa, unidentified
  source 1..185: note = uncultivated organism;MG160-442 reverse transcriptase
MKNYSSKIPLGADKFAYEQVPSFKLLGEALSSRIYDAWQPPSIFYHHRNGGHIAVLDKHLQSDTFSRFDISQFFNRVTKNKIIKALKTCGFSLIKASESTAHSVVKTEARFHLPYGFTQSPALASLCLNRNQAGKFLGKLDKDILVSVYVDDIILSHKNDPIKLWKVSKSLIKTFTSVGFQNFRN

SEQ ID NO: 1431 - protein, 259 aa, unidentified
  source 1..259: note = uncultivated organism;MG160-443 reverse transcriptase
MKNYSSKIPLGADKFAYEQVPSFKLLGEALSSRIYDAWQPPSIFYHHRNGGHIAVLDKHLQSDTFSRFDISQFFNRVTKNKIIKALKTCGFSFIEASEAAAHSVVKTEAGFHLPYGFTQSPALASLCLNRSQAGKFLGKLDKDILVSVYVDDIILSHKNDPIKLRKVSENLIETFTSVGFPIAETKSVIAQPTITAFNIELHNNSMALTPERLIGFHNQVIAGWQSDDVLVGIHNYVLSVDAAQGAEIEHAISRMQSRR

SEQ ID NO: 1432 - protein, 185 aa, unidentified
  source 1..185: note = uncultivated organism;MG160-444 reverse transcriptase
MKNYSSKIPLGADKFAYEQVPSFKLLGEALSSRIYDTWQPPSTFYHHRNEGHIVVLDKHLQTDTFSRFDISQFFNRVTKNKIIKALKTCGFSLIKASESTAHSVVKTEVGFHLPYGFTQSPALASLCLNRSQAGKFLGKLDKDILVSVYVDDIILSHKNDPIKLRKVSKSLIETFMSVGFPNFRN

SEQ ID NO: 1433 - protein, 256 aa, unidentified
  source 1..256: note = uncultivated organism;MG160-445 reverse transcriptase
MNKIPLGDNKFAYKQEPAYKVLGERLCEKVYSKWTPPSIFYHHRNGGHIAALRKHLPNEHFSKFDISRFFYRISRNKIICALKKCGFSFLEAREAAAQSVVNSGEGFNLPYGFTQSPLLASLCLNRSQAGEFLRGLDKDICVSVYVDDIIISNNDNPAELAEVSEKLISKFNDAGFPISQEKSIISLDEVSSFNITLSNNRMEITPDRMAEFQNQVAEGANNDDVLDGIHNYVRSVNPDQAVKILEVIERARTRRT

SEQ ID NO: 1434 - protein, 259 aa, unidentified
  source 1..259: note = uncultivated organism;MG160-446 reverse transcriptase
MKNYSSKIPLGADKFAYEQVPSFKLLGEALSSRIYDAWQPPSIFYHHRNGGHIAALDKHLQSDTFSRFDISQFFNRVTKNKIIKALKTCGFSFIEASEAAAHSVVKTEAGFHLPYGFTQSPALASLCLNRSQAGKFLGKLDKDILVSVYVDDIILSHKNDPIKLRKVSENLIETFTSVGFPIAETKSVIAQPTITAFNIELHNNSMALTPERLIGFHNQVIAGWQSDDVLVGIHNYVLSVNAAQGAEIEQAISRMQSRR

SEQ ID NO: 1435 - protein, 255 aa, unidentified
  source 1..255: note = uncultivated organism;MG160-447 reverse transcriptase
MKNYLSKIPLGNNKFAYEQVPEFKESGLLYKAKIEGRWTAPEHFYHLKDGGHVAALTKHLQNDMFSKIDLSRFFYRVTKNKIIRSLKRTGLPFQECLEIAADSVVKTENGFSLPYGFVQSPLLASIALHFSGLGKFLTELPSEILVSVYVDDIILSSNGNRELLQDKSSALLASASKAGFPTNSEKCELVSSQIETFNVKLSNQNLWLTDDRMVEFHGFLRAAPSDTQIQGVLGYVGQINQDQMADLGKTAAKYK

SEQ ID NO: 1436 - protein, 185 aa, unidentified
  source 1..185: note = uncultivated organism;MG160-448 reverse transcriptase
MKNYSSKIPLGADKFAYEQVPSFKLLGEALSSRIYDAWQPPSIFYHHRNGGHIAVLDKHLQSDTFSRFDISQFFNRVTKNKIIKALKTCGFSFIEASEAAAHSVVKTEAGFHLPYGFTQSPALASLCLNRNQAGKFLGKLDKDILVSVYVDDIILSHKNDPIKLWKVSKSLIKTFTSVGFQNFRN

SEQ ID NO: 1437 - protein, 259 aa, unidentified
  source 1..259: note = uncultivated organism;MG160-449 reverse transcriptase
MKNYSSKIPLGADKFAYEQVPSFKLLGEALSSRIYDAWQPPSIFYHHRNGGHIAALDKHLQSDTFSRFDISQFFNRVTKNKIIKALKTCGFSLIKASESTAHSVVKTEAGFHLPYGFTQSPALASLCLNRSQAGKFLGKLDKDILVSVYVDDIILSHKNDPIKLRKVSENLIETFTSVGFPIAETKSVIAQPTITAFNIELHNNSMALTPERLIGFHNQVIAGWQSDDVLVGIHNYVLSVNAAQGAEIEQAISRMQSRR

SEQ ID NO: 1438 - protein, 259 aa, unidentified
  source 1..259: note = uncultivated organism;MG160-450 reverse transcriptase
MKNYSSKIPLGADKFAYEQVPSFKLLGEALSSRIYDAWQPPSIFYHHRNGGHIAVLDKHLQSDTFSRFDISQFFNRVTKNKIIKALKTCGFSLIKASEATAHSVVKTEVGFHLPYGFTQSPALASLCLNRSQAGKFLGKLDKDILVSVYVDDIILSHKNDPIKLRKVSESLIETFTSVGFPISETRSVIAQPTITAFNIELHNNSMALTPERLIGFHNQVIAGWQSDDVLVGVYNYVLSVNAAQGAEIEHAISRMQSHR

SEQ ID NO: 1439 - protein, 259 aa, unidentified
  source 1..259: note = uncultivated organism;MG160-451 reverse transcriptase
MKNYSSKIPLGADKFAYEQVPSFKLLGEALSSIIYDAWQPPSIFYHHRNGGHIAVLDKHLQSDTFSRFDISQFFNRVTKNKIIKALKTCGFSFIEASEAAAHSVVKTEAGFHLPFGFTQSPALASLCLNRSQAGKFLGKLDKDILVSVYVDDIILSHKNDPIKLRKVSENLIETFTSVGFPIAETKSVIAQPTITAFNIELHNNSMALTPERLIGFHNQVIAGWQSDDVLVGIHNYVLSVNAAQGAEIEQAISRMQSRR

SEQ ID NO: 1440 - protein, 216 aa, unidentified
  source 1..216: note = uncultivated organism;MG160-452 reverse transcriptase
MKRWKRPPFYYHLQSGGHVAALQCHVKHKYFACLDIEDFFGSVSQTRVTRCLVPWFGFEEARNMARESTVRHPSDKNVTMLPHGFTQSPILASLALAKSAVGNKLIALAKEMAVSVYMDDIILSSDSESQVADARAALEHLAPPSRFKFNADKCQGPSTKVTVFNVKLEQGLLSISDERFDLFATALGDSPSEYVREGILSYVRSVNVTQADALGA

SEQ ID NO: 1441 - protein, 270 aa, unidentified
  source 1..270: note = uncultivated organism;MG160-453 reverse transcriptase
MDLSEITIKDIALLLKITEENLAKLSEKAPHMYYTREMRKRNGGIRIIEAPHTSLKKIQKILLDQLFSGLSYDPILFGGKGSSTKKAVRRHTRKALVITLDIKNFFPNVKSHKVKKMFIRRGAKHDVADLLTRLVTYKNHLPQGAPTSPCIARLILNPVAIHIKRVVRSVKARIEPSIWVDDIIISGPKGLKRLKKTLISIFNRYDFQIPEEKFKIMPDNQEQVSLGIRLNDGIGVPSSYLQKYKAECKKLGASSKRCQGMKAHIRNLQN

SEQ ID NO: 1442 - protein, 255 aa, unidentified
  source 1..255: note = uncultivated organism;MG160-454 reverse transcriptase
MKNYLSKIPLGNNKFAYEQVPEFKESGLLYKAKIEGRWTAPEHFYHLKDGGHVAVLTKHLHNDMFSKIDLSRFFYRVTKNKIIRSLKRTGLPFQECLEIAADSVVKTENGFSLPYGFVQSPLLASIALHFSGLGKFLTELPSEILVSVYVDDIILSSNGNRELLQDKSSALLASASKAGFPTNSEKCELVSSQIETFNVKLSNQNLWLTDDRMVEFHGFLRAAPSDAQIQGVLGYVGQINQDQMADLGKTAAKYK

SEQ ID NO: 1443 - protein, 276 aa, unidentified
  source 1..276: note = uncultivated organism;MG160-455 reverse transcriptase
MNQCFSTLTLDQLPHKLGLEPDKLWRISEKAPCSYRVHQEIKKSGGFRNIEAPNGDLKKVQRKLLKHVLNKIRIDPVFYGVKGTCMVDAIRMHCQKPLVISMDVQNFFPSVTREEIRHALLTRGMTKEVVKVITRLTTYQNRLPQGAPTSPILAALALQPKVREILNMLAPYEGMNISVYVDDITISGPEGLKRFINPITKVIKNSPFSVHPGKTKKMYPQDPPVVLGVEIHGPQLTTTPEFDAKLLDARDRFGSNSLIVKGMINFQRSLNFKKSA

SEQ ID NO: 1444 - protein, 273 aa, unidentified
  source 1..273: note = uncultivated organism;MG160-456 reverse transcriptase
MTVLLKDLNVDSLSDILGIPQSVLVDLTDIAPRLYFEKLHPKKNGGFRTLGIPYSVLKKVQKSLLTKIFNNVPTHPKLFGRPGTSIKDAVASHTKKAVVITMDIKNFFPSTKSYKIKNALMRNGVSIEISELLTRLVSHKNHLPQGAPTSPCIGRIVLHPVAEQIEGYLSNISRSDFSIYVDDITLSGPKGIEKVKEHIYKILNRHKYEINKSKTYVMKREADQVSLNIKLNNGIEATEKMLEEIEKLEFVLPMNHPTLLGKKSFVKFLMKNQ

SEQ ID NO: 1445 - protein, 245 aa, unidentified
  source 1..245: note = uncultivated organism;MG160-457 reverse transcriptase
MAVAIPNFEYSYRRKGKPVFVPTGIGRRIGNEIKGEVEGAYDFDPIYFHLRRGGHVAAMHHHRDNLRFARIDISRFFYSVSRRRVQSALDRIGVANARFYAKWSTVANPYDDPKYALPYGFVQSPILASLVIATSQVGDHLLGLPASVSVSVYMDDISLSSDDPGDLANAYGSTLAVLAADGFQVSAEKLRAPSAAIDIFNCDLTHGRASVRDERIAEFFANGPDQISEDAFIAYCASVEIGNHS

SEQ ID NO: 1446 - protein, 253 aa, unidentified
  source 1..253: note = uncultivated organism;MG160-458 reverse transcriptase
MPAKWLHKFERKPGRWIFEPSPEARAEGIEVKELVESRWKAPRYYFHLRQGGHVAALHRHQRNSCFIKVDIADFFGSVSRSRVSRVLKEFFSHPEARRMATASTVQHPEDPARQILPYGFVQSPLLASLVLHKSALGKWLDELRRDRRFVVTVYVDDIIVSGTDAAELGGILTTLKVKAQQSRLPFSDEKEQGPAGSISAFNIELAAGSVLSVLPPKLAEFRDAFQASTSELQRAGIQGYVRSVNPVQADTLP

SEQ ID NO: 1447 - protein, 163 aa, unidentified
  source 1..163: note = uncultivated organism;MG160-459 reverse transcriptase
MFDYTEARRIATASTVKHPTQDNKVILPYGFVQSPILASLALAQSALGSCLERLSKQRRIHVSVYMDDIIVSSNSDKYLTNAQSQLEDAAKKARFAFHSDKTEGPANMVTAFNIELSPNDLSVAPHRLQQFAETYRSSDNGLQKEGIAGYVNSVNPNQAAELL

SEQ ID NO: 1448 - protein, 280 aa, unidentified
  source 1..280: note = uncultivated organism;MG160-460 reverse transcriptase
MGRTETLEKLLAEYPADAGVFCGFEPKPDGTSRPIVKPNKSLNRWLKQVKRALYQQRKNWPTFIHGGVKKRSYVSFARPHTNKKTVIAIDIHNCFGSITQQEVQTALVNKLSLSDGLASRLAAKLCYKRRVPQGFATSSYLTNLYLNDTLLTINRKLRCLQVGMTIYVDDIALSAQSMDSAEVINTVILELSRARLMVKKAKIRVMHSHGPQIICGLIVNKGIALTRQKKKQLFSDIANKRMSEVALRGWLANLNMIDRELMSKLETYAISKGIIVKEGA

SEQ ID NO: 1449 - protein, 163 aa, unidentified
  source 1..163: note = uncultivated organism;MG160-461 reverse transcriptase
MFDYTEARRIATASTVKHPTQDNKVILPYGFVQSPILASLALAQSALGSCLERLSKQRRIHVSVYMDDIIVSSNSDKYLTNAQSQLEDAAKKARFAFHSDKTEGPANMVTAFNIELSPNDLSVAPHRLQQFAETYRSSDNGLQKEGIAGYVKSVNPNQAAELV

SEQ ID NO: 1450 - protein, 224 aa, unidentified
  source 1..224: note = uncultivated organism;MG160-462 reverse transcriptase
MGAKIKTQVEGVWTAPDYFFHLRAGGHVRALQVHMGQASFLHLDIQDFFGCVNRSRVTRCLSPHFGYTNARQMANDSTVQHPVDLGKYMLPYGFVQSPLLASLAFAHSKLGSCLSKLKEEGYCVSVYVDDIIISAGSDSALNECWPDIQSAAESAKFPLNPTKMQGPGPMVTAFNIELSHGSLRLRSGRLNEFQSAYQTTSNPHARNGIFGYVQAVNPAQAATL

SEQ ID NO: 1451 - protein, 269 aa, unidentified
  source 1..269: note = uncultivated organism;MG160-463 reverse transcriptase
MPLNYEYSFEIRPGKPVFIQRKDALDQGKRLTTAIEEEYQPSDLFFHFRKRGGHVAAMKKHLGNAYFSRFDLNDFFGHVTRTKIVRALRNLGWSHKDAFFDAVDSVVVLNGQRVLPFGFHQSPLIATLVLEQSLLGQFLQRQAHRGFTVSIYMDDILISGNDQASLADTSAELVEVAASAGFPVSAQKQAVALEEATIFNCVLNQDSVRFLDRRMRKFLVDHDATSDLGKQAIEGYIRAVSHDEHESFLRQLDQPDDSAGFGVNVRRFP

SEQ ID NO: 1452 - protein, 257 aa, unidentified
  source 1..257: note = uncultivated organism;MG160-464 reverse transcriptase
MHSYPRWRHKYELKTDVWVFEPTEETILIGNKIKNAVQNAWVIPNNYYHFNLGGHVAALNLHKSDKIFVHLDIKKFFNSINKSRITRSLKTLFDYSTSRKYALQSTVKHPKKLPTTYILPYGFVQSPILASLCLRQSALGIKINNISKFRLVRISVYMDDIIISGNDENLLLNVVSELKLAAAKSNFKLHKEEGPSLNITAFNINLSFNSTFITHDRYKELWCDYNKTTNNNVKHGIATYVSTVNSNQLDGLERPLA

SEQ ID NO: 1453 - protein, 262 aa, unidentified
  source 1..262: note = uncultivated organism;MG160-465 reverse transcriptase
MITNYINRIPFGDGKWLFEQDPVFADAAKKQVMRIKKKWRPPEHFYHLAKGGHVSAISHQLDYSWFCKVDLKRFFQQITRNRVTRHLRSIGYPKLDAIDFAKDSTVLYGDIGPRHFALPYGFTQSPILASLVLDGTPLGKEMYDLVAQDFEVGVYVDDILIAHKDKGQIELAWERAIEAATRSNLVVNEKKSSPPATSCEAFNINYEAGLMQITADRMAEFSEEVLMCGKGATATAILEYVRSVNEDQARELKASFPGIYGP

SEQ ID NO: 1454 - protein, 226 aa, unidentified
  source 1..226: note = uncultivated organism;MG160-466 reverse transcriptase
MGAKIKTQVEEVWTAPDYFFHLRAGGHVRALQVHMGHTSFLHLDIQDFFGCVNRSRVTRCLAPHFGYTNARQMANDSTVRHPVDLGKFMLPYGFVQSPLLASLAFAQSKLGSCLSKLRGQGYCVSVYVDDIIISAGSDSALHECWPEIQGAAESAKFPLNPTKKQGPGPMVTAFNIELSHGSLRLKSGRLDEFQSAYQATSNPHERGGIFGYVQAVNTAQAATLWI

SEQ ID NO: 1455 - protein, 223 aa, unidentified
  source 1..223: note = uncultivated organism;MG160-467 reverse transcriptase
MAVEACWTSPTFYYHLRSGGHVEAVKSHLNHTCFLHVDIEDFFGSINRSRVTRSLKNKVGYKVAREMAHASTVKHPGDGTRCVIPYGFVQSQIIASLCLDESRLGTYLKKLSNMEGVSVSVYVDDIIVSCDSSAVSECILKGLNDAAAKANFKLNPVKQEGPATAITAFNIVLKNKSLEISAPRFEQFISTLEQTTSQFQRDGITSYVKSVNVVQGASLLASP

SEQ ID NO: 1456 - protein, 278 aa, unidentified
  source 1..278: note = uncultivated organism;MG160-468 reverse transcriptase
MGKTETLEKLLTEYPADARIFCSLEPKPDGTSRPIVKPNKSLNKWLKRVKQVLYQQRRDWPGFIHGGVKKRSYVSFAHPHTNKKTVITMDLRNCFGTITQREVQAALVKKLDLPEGLASRLVARLCYKRRLPQGFATSNYLTNLYLNDTLLRINRQMKRRQIDMTIYVDDIALSAQRLNSAEIINLVSLELSRAKLAINKAKVKVMHAHKAQVICGLNVNKGIAIDREKRKELFSDIANGRISEASLRGWLANLHMVDPSLMRKLESYALQKGLIKKG

SEQ ID NO: 1457 - protein, 245 aa, unidentified
  source 1..245: note = uncultivated organism;MG160-469 reverse transcriptase
MPVSFQNYDFSFQLKGRAVFVPSSDGREIGQRIKSLIETKWPFDDTFFHFLPGGHVRALHIHREQRYFARIDLQNFFYSIGRNRVKRTLKEIGIKKAEHFSKWSTVKNPYMPPSYSLPYGFIQSPILASLALLKSEVGISLRHLPDVILRTIYMDDILLSSNDLAELTAAYVAVQESIGASGFQINIAKAIPPSESILAFNCRLELGLTEVTGDRIAEFHGVARSPASVASFDNYCASVATGNRA

SEQ ID NO: 1458 - protein, 279 aa, unidentified
  source 1..279: note = uncultivated organism;MG160-470 reverse transcriptase
MELSSLTVEELARNLGLSTDALKSLADMAPRLYRPRDIPKKSGGTRRIDAPHRNLKAAQTLLLHRVLTHLHTHPILYGGKGTSPEMAVAAHVRKPLVMTLDLKDFFPSVSRRMVLEMLMSRGASRVVATLVCRLVTFKNHLPQGAPTSPQIARLVLHPAAGHIVTALKRTTEQSNGSIWVDDVTVSGPLGLKRLMPTLIRIFERHGFRVNRKKCEMMGADREQVSLGMKLNNGIAPTSAYLAEYERECTRLGSTHQRCVGMRRRIKKLVCGGLATTPIP

SEQ ID NO: 1459 - protein, 257 aa, unidentified
  source 1..257: note = uncultivated organism;MG160-471 reverse transcriptase
MEIEVQRWDHKFEIRPGVWVYVPSAEASELGERIIQAIRNKWIPPLYFYHLRTGGHLKAARLHLKSDFLAVVDIKNFFQSTSRSRVTRDLKAYFTYSQSREISKFSTVRNLSHSPHKHVLPFGFVQSPMLATLCLDRSYLGSLLRRLNKHPNVKLSVYMDDVIISSNDLVQLQTAYDEILVAMDKSGYQPNLVKTQEPSVLINVFNLSLGRGTMKVSPQKMSDFIIDFYASDYEPHKIGVKNYVETVNPAQAKLLKL

SEQ ID NO: 1460 - protein, 207 aa, unidentified
  source 1..207: note = uncultivated organism;MG160-472 reverse transcriptase
MVVRFLNFDYSYERKGKPVYAPSELGSKIGQDIKKQVEAAYDFDDFVYHLRRNGGHVAALHAHRDHQSFARVDIANFFYGIAKSRVQRALSAIGIVRARHYAKWSCVKNPYADDPAYVLPYGFVQSPILATLVLMQSGVGSYLRDIHAAGQVTVSVYMDDLSSPRTTPMRSQKLSTACEPAWKTRISISVPARPASRMPAWMCSTAC

SEQ ID NO: 1461 - protein, 253 aa, unidentified
  source 1..253: note = uncultivated organism;MG160-473 reverse transcriptase
MEAWKHKFEIKKDRWVHVPSKDMVIFGKKLHKFIRRKWNPPFYYYHLRNGGHVIAAKNHKHNDFFSAIDISNFFESTSQSRVTRELKTILPYNQAREVAKISTVRVPGSKDKKFSIPYGYPQSPILASFCLRNSYVGNVLDSINKGGLILVSVYMDDIVLSSKDLNVLNDAFNLICNALKKSHYQINIDKTQPPSEKIRVFNLELSHDQIKVCSDRLIQFIQAYAKTQNEFERKGIAAYIRSVNPQQANLHFP

SEQ ID NO: 1462 - protein, 237 aa, unidentified
  source 1..237: note = uncultivated organism;MG160-474 reverse transcriptase
MFVPTDDFIEYGTEVKEKIAKKWQSPNFYYHLRNGGHVSALKKHIKHQHFIHLDIQNFFGQINRSRTTRCLKEYFSYTEARNIAIKSTVRLPHSTIKKYILPFGFVQSAIIASLCLHKSTLGQHLHQLSHQNDLAVSVYMDDIIISSNSHQQLVEALEPVEVAANKAGFPLNKDKQEGPCEKISAFNIFLAHNELAVTSDRLSDFLSVFEESSNEYQKNGILNYVSCINTKQVALFE

SEQ ID NO: 1463 - protein, 206 aa, unidentified
  source 1..206: note = uncultivated organism;MG160-475 reverse transcriptase
MAALFDHAMNTHFCVMDIKTYFTSTTRSMVVKALKQVGYRYPQAMRDASESSVRHPDTMGQRVLPYGFIQSALLATLCLEYSHVGRVLRELDKSPLTLSVYMDDIIVSGDAEMERDVEDAFTQLGNAFDRSPYSINRVKTQPPSREICVFNALMSHHSIQVHHDRMEKFKEALFANENPHSISAILRYVGVLNPSQEKELEAYLNS

SEQ ID NO: 1464 - protein, 246 aa, unidentified
  source 1..246: note = uncultivated organism;MG160-476 reverse transcriptase
MLVNYDFTYQRKGKHIFVPNDDCVGRGKSLIKFCSRAVEFPSYFFHYEAGGHVAALHGHLRNHFFFRIDLENFFYSISRNRVAAALHASGFWQARSYAQWSCVKNPVRGPTYALPIGFVQSPVLASLVILHSPLAAAIEQARSQGVFISVYFDDFIGSSADQDNLTVAYEAIRRACAEANFVSNPLKLAEPAERIVAFNCDLSHGIAVVTRDRIAKFFETPRTDAATRAFEAYRERVASENRAIDA

SEQ ID NO: 1465 - protein, 247 aa, unidentified
  source 1..247: note = uncultivated organism;MG160-477 reverse transcriptase
MLENYKHKYTSRGKFIFVPTPECDRRADRLLRFAEDIELPPYFFHYRRGGHVEALHQHLERRYFFRIDLKNFFYSISRNRVNRILRQSGFRSAREWSEWSTVRNPYNVGPRYVLPIGFKQSPLLASLALWRSAVASSIEEAGERGVFVSVYFDDLIGSSNDENELRVTYAGLLAACEQANLVANEAKLIEPANAIVAFNCHLTHGRANVTDERIQRFIDEVRGPNAETSFIDYCIRVQRFNRAMEVN

SEQ ID NO: 1466 - protein, 246 aa, unidentified
  source 1..246: note = uncultivated organism;MG160-478 reverse transcriptase
MYINYELTFKHKGKHIFVQNRNGKRRGRQIVDYCSSEVTFPPHFYHYQPGGHVASLHRHMKNRYFFRIDIENFYYSIARNRVAEALHSIGFREARDYAKWSCVKNPFREPAYALPIGFIQSPVLASLVIMRSAVAKAVEDANSAGVFVSVYFDDFIGSSSDLDSLSGAYESILAACTVANFVPNEGKRVAPSERLVAFNCDLEHNRVAVTKERVAAFYQGQPSETSSAAFERYCDRVAGIDIASTA

SEQ ID NO: 1467 - protein, 254 aa, unidentified
  source 1..254: note = uncultivated organism;MG160-479 reverse transcriptase
METWKHKFLLKKNKWVHIPSDEMLKYGSALHIFLRKNWKFPLYYYHLRNGGHVTAAKLHKNNDFFCLIDIKGFFESTTQSRVTRELKKVVPYQEARKIAKLSTVRLPNAVTHKFAVPYGYPQSPVLATLCLQNSYAGSVIDSFYRSGIVTVSVYMDDIILSSKDLAILSQHFELLCGALRKSRYEINLSKTQSPTTKISVFNLELGHRHLKVESARMILFIQAFAKTRNKHEKKSIAKYVHTVNPDQAERHFPK

SEQ ID NO: 1468 - protein, 211 aa, unidentified
  source 1..211: note = uncultivated organism;MG160-480 reverse transcriptase
MAAIQSHIDDRYFLNVDIKNFFGVINRSRITRSLKKRFPYAQAREITVQSTVRVVGESRYEYHLPYGYPQSTILASICLVDSALGRYLNSLSNQCNVSVYVDDIIISGNDPDELQQISDTLAEKSEVSRLFFGRQKAHQVSETITAFNIELSQHKTKITHQRYSQLLQQALLADNESVINGVLGYVRSVNREQHIEMHKELFTLGHIKAPA

SEQ ID NO: 1469 - protein, 239 aa, unidentified
  source 1..239: note = uncultivated organism;MG160-481 reverse transcriptase
MPDDKTKIRGKEIKKVIASKWKPPHYYAHLRQGGHVTALKKHLGNTLFIRTDIEQFFNSIGRTRVTRHIHSLFKDYNLARDMANESTVVRPNHTPKAYILPYGFVQSAIIASLCLHKSALGRYLNKLEGSGFKVSVYMDDIIVSTSLPLEQAEAALEELKSKATKSRLKLNPEKTIGPVDSICAFNITLTQNNIEISDERLAEFEEELSNTEEQSVIDGILGYVETISPAQAETLRCRQ

SEQ ID NO: 1470 - protein, 256 aa, unidentified
  source 1..256: note = uncultivated organism;MG160-482 reverse transcriptase
MPLHEKWITKFSLKGKTWVFVPNDESITFGAALKQAIEEHWKIPHNYYHFKEGGHVAALRQHIHNSFFLRLDIDNFFGQINRSRITRNLNTFCTYANARQYAIESTVRDPDSKEAKYILPFGFVQSPILASLCLRKSALGGYLSSLSKQPNIVCNVYMDDILISGNDSKKLEDIGGQLEIDASRSRFPLSKTKREGPSESVTAFNVTITQGVLNITQTRMTEFETAFRESNNENQRNGILRYIESVNPSQSASLGA

SEQ ID NO: 1471 - protein, 245 aa, unidentified
  source 1..245: note = uncultivated organism;MG160-483 reverse transcriptase
MTVQFANFEYSFTLKDKPVFKPSERGKAIGLALKEEVERAITFDPFYYHLRDGGHVAALHAHRPHRWFARLDIERFFYGIGRNRVARALAKVGIPKAGYRAKWSCVRNPYNDPRYALPYGFVQSPILATLVLMSSEVGEFLRNLAGAVTASVYMDDIAVSSDDQVLLQEAFDALREVAAQSNFVLNAEKTRAPAEVIELFNCNLFHHVTAVREERRALFYEEPRNDASQLAFERYCDRIEEGNAG

SEQ ID NO: 1472 - protein, 252 aa, unidentified
  source 1..252: note = uncultivated organism;MG160-484 reverse transcriptase
MTPSDQWLYKFRRKSGWVFVPAQATIDYGREVKALIEKHWEAERYYYHLRQGGHVAALRHHRPHRYFLHLDIKTFFGNINASRITRCLKGMLSYAKAREIAIHSTVHHPHAKRLSIFPYGFIQSPIIASACLRESTLGKCLHDLHKQSGLSVSVYMDDIIISSDDIDVLTAAMEKIEQASERCGLPLNKKKQEGPGKMVTAFNIELSQHNLDINAKRLAEFQSTYHASLNPNQKDGILNYVKTINISQAATF

SEQ ID NO: 1473 - protein, 245 aa, unidentified
  source 1..245: note = uncultivated organism;MG160-485 reverse transcriptase
MPVHFKNFTHSFLLNGKTVFAPNDLGRRIGEDIKAKVEAAYEFEPFFYHLTSGGHVAALHAHRESEFFCKADIENFFYSISRNRVVRTLRELGVDRPKHYGKWSCVKNPYHAPRYTLPYGFVQSPILASLILSTSAVGNFLRRISGEVTVGVYVDDISLSSNDPDRLRHCYDGLLSAMEEATLHAKRSKCVPPSREVDIFNCHLKKESTKVLEERRADFFSVHRSGCSAEAFERYCDGVTNGNRL

SEQ ID NO: 1474 - protein, 155 aa, unidentified
  source 1..155: note = uncultivated organism;MG160-486 reverse transcriptase
MAVDSTVRHPIESKRWVLPYGFLQSPILASLALAKSRLGTILDRLHKTSDMSVSVYVDDIIVSCNDLPKLEKACEVLIAAATKAGLAFNAAKCEGPATTITVFNVELTHANLAIIAKRMEEFARDLGLGGEQQRRGILGYVNSINADQAKALATS

SEQ ID NO: 1475 - protein, 244 aa, unidentified
  source 1..244: note = uncultivated organism;MG160-487 reverse transcriptase
MIVNYEFKYRSRGKWFFVPNDKCERRGRRMLAYFKRRVMFPDYMYQFKKGGHVAALHGHLNNHFFFKIDIQNFYYSIARMRVTRALRQWGYPGANTFATWSCVRNPLPGPKHVLPIGFVQSPLLASLALMKSEVADGIERARAKGVCISVYLDDFIGSHDDEALLTAAYEDIRDTCVAAGFIPNPGKLVPPQGAITAFNCDLTNGSAEVTAARIAKYLSRPDRTPLSDAGFGEYRDLVRSQNMS

SEQ ID NO: 1476 - protein, 1005 aa, unidentified; identical to SEQ ID NO: 9
  source 1..1005: note = uncultivated organism;MG140-147 retrotransposition protein

SEQ ID NO: 1477 - protein, 7 aa, synthetic construct
PKKKRKV

SEQ ID NO: 1478 - protein, 16 aa, synthetic construct
KRPAATKKAGQAKKKK

SEQ ID NO: 1479 - protein, 9 aa, synthetic construct
PAAKRVKLD

SEQ ID NO: 1480 - protein, 11 aa, synthetic construct
RQRRNELKRSP

SEQ ID NO: 1481 - protein, 38 aa, synthetic construct
NQSSNFGPMKGGNFGGRSSGPYGGGGQYFAKPRNQGGY

SEQ ID NO: 1482 - protein, 42 aa, synthetic construct
RMRIZFKNKGKDTAELRRRRVEVSVELRKAKKDEQILKRRNV

SEQ ID NO: 1483 - protein, 8 aa, synthetic construct
VSRKRPRP

SEQ ID NO: 1484 - protein, 8 aa, synthetic construct
PPKKARED

SEQ ID NO: 1485 - protein, 8 aa, synthetic construct
PQPKKKPL

SEQ ID NO: 1486 - protein, 12 aa, synthetic construct
SALIKKKKKMAP

SEQ ID NO: 1487 - protein, 5 aa, synthetic construct
DRLRR

SEQ ID NO: 1488 - protein, 7 aa, synthetic construct
PKQKKRK

SEQ ID NO: 1489 - protein, 10 aa, synthetic construct
RKLKKKIKKL

SEQ ID NO: 1490 - protein, 10 aa, synthetic construct
REKKKFLKRR

SEQ ID NO: 1491 - protein, 20 aa, synthetic construct
KRKGDEVDGVDEVAKKKSKK

SEQ ID NO: 1492 - protein, 17 aa, synthetic construct
RKCLQAGMNLEARKTKK

SEQ ID NO: 1493 - RNA, 4247 nt, synthetic construct; identical to SEQ ID NO: 896
  source 1..4247: mol_type = other RNA; note = RNA template

SEQ ID NO: 1494 - DNA, 20 bp, synthetic construct
  source 1..20: mol_type = other DNA; note = First100bp_FP
ggtttgggtttgggtttggg

SEQ ID NO: 1495 - DNA, 20 bp, synthetic construct
  source 1..20: mol_type = other DNA; note = First100bp_RP
atcctgatgggagtctcctc

SEQ ID NO: 1496 - DNA, 21 bp, synthetic construct
  source 1..21: mol_type = other DNA; note = Last100bp_FP
gagactcccaagttttggaac

SEQ ID NO: 1497 - DNA, 24 bp, synthetic construct
  source 1..24: mol_type = other DNA; note = Last100bp_RP
gggagaatggtatttactctcgaa

SEQ ID NO: 1498 - DNA, 27 bp, synthetic construct
  source 1..27: mol_type = other DNA; note = First100bp_Taqman probe_FAM
actctgtgagcggatcttggcttagcc

SEQ ID NO: 1499 - DNA, 21 bp, synthetic construct
  source 1..21: mol_type = other DNA; note = Last100bp_Taqman probe_HEX
ctggagcaaggcggcgtcagc

SEQ ID NO: 1500 - DNA, 2628 bp, synthetic construct
  source 1..2628: mol_type = other DNA; note = FH-MCP-MMLV Eng
atggactacaaagacgatgacgacaagtacccctatgatgtacctgattatgctgccagcaatttcacacagttcgtccttgtagacaacggcggcaccggggatgttacagtggccccgagcaatttcgcaaacggcgtagccgagtggatctcctctaatagcagaagccaggcttataaggttacatgctctgtaaggcagtcttccgcacaaaatagaaagtacacaatcaaggtcgaagtgcccaaggttgctacacagaccgttggtggagaggagttgccagtggctgggtggcgctcctacctgaatatggagttaacaatccccattttcgctaccaattcagactgtgaactcattgtcaaagctatgcaaggtcttcttaaggatggtaacccaattccaagtgcaattgctgctaattcaggcatttattctggcggcagcagcggcggctcaagcggaagtgaaacacctggaacttccgaaagcgctacgcctgaatcttctggtggatcttctggcggatcttccgcatgcgtcgacactctgaacatcgaggacgaatacaggctccacgaaacttctaaggaacctgacgtgtccttgggatcaacttggttgtccgacttcccccaagcttgggccgagacaggcggaatgggtttggccgtgagacaggccccactcataatcccacttaaggcgacatccactccggtcagtatcaagcagtatccaatgtcccaggaagcacgcttaggaattaaaccacatattcaacgactcctggatcaaggtattctcgtcccatgtcaaagcccttggaatacccctcttctgcctgtgaagaagcccggcacaaacgactaccggcccgtgcaagacctcagggaagtgaataaacgagtcgaggatatacatccgactgtcccgaatccctataatctgctgtcaggtctgccaccaagtcatcaatggtatacagtactggacctgaaagacgcgttcttttgtttgcgactgcatcctacgtctcaaccgctgtttgcattcgaatggcgggaccccgaaatggggatttctgggcagctgacatggactcgtcttcctcaagggtttaagaactcccctacacttttcaacgaagccctgcatcgggatttagctgattttagaatccaacatcctgatctgattctcctgcaatatgttgacgatctgctcctcgctgcaaccagtgaacttgattgtcagcagggaacgagagctttactccagactctgggcaatcttggttaccgtgcttcagctaagaaggctcagatatgtcaaaagcaagtgaaataccttggttacctgttgaaggaagggcaacgctggttaaccgaagctcgcaaggaaacagtaatgggccaacccacacccaaaacaccccgccagctgagagaatttctcggtaaggctggattttgcagactgttcattcccggtttcgccgagatggccgcacctctttatccactgacgaagcccggtaccctcttcaactggggacccgatcagcagaaagcttaccaggagattaaacaggcactgctgaccgctcccgcgctcggcctgcccgacctgacgaaaccattcgagcttttcgtggatgagaaacaaggatatgctaagggagtgctgactcagaagcttgggccgtggcgacgcccagtagcttatctcagcaagaaactggatcctgtggccgccggttggccgccatgtttgagaatggttgccgctatcgcagtcctcaccaaagacgccggtaaactgacaatggggcaacctctggtgatcctcgctccgcacgctgtggaagccttagtgaagcagccacctgataggtggttaagcaatgcgagaatgacccattaccaagcgttattgctggataccgatagagtgcaatttggccccgttgtcgctctcaatcccgcgactcttctgcccttaccagaagagggacttcagcataattgtttggacattctcgcagaggctcatggcactcggccagatctcaccgatcaaccccttcctgatgctgatcatacttggtatactgacggctcatccctgctgcaggaaggccaaagaaaagccggcgccgctgtcacaacagaaactgaagtgatttgggccaaggcactccctgcaggaactagcgcccaaagagccgagctcatcgcccttactcaagctctcaaaatggccgagggcaagaaacttaacgtgtacacagactccaggtacgccttcgccacagcacacattcacggcgagatctatcgccgaaggggatggctgacgagtgagggaaaggaaattaagaacaaggatgaaatactggcgctgctgaaggctctgtttctccctaagcggctgtccattattcactgccctggtcaccagaaagggcattccgctgaagccaggggcaataggatggcagatcaggctgcaaggaaagctgcaattaccgaaacgcccgatacgagcacacttcttatcgagaactcttccccttcaggcggtagcaagcggacagcagatggatccgagtttgaatga

SEQ ID NO: 1501 - DNA, 2628 bp, synthetic construct
  source 1..2628: mol_type = other DNA; note = FH-MCP-MMLV WT
atggactacaaagacgatgacgacaagtacccctatgatgtacctgattatgctgccagcaatttcacacagttcgtccttgtagacaacggcggcaccggggatgttacagtggccccgagcaatttcgcaaacggcgtagccgagtggatctcctctaatagcagaagccaggcttataaggttacatgctctgtaaggcagtcttccgcacaaaatagaaagtacacaatcaaggtcgaagtgcccaaggttgctacacagaccgttggtggagaggagttgccagtggctgggtggcgctcctacctgaatatggagttaacaatccccattttcgctaccaattcagactgtgaactcattgtcaaagctatgcaaggtcttcttaaggatggtaacccaattccaagtgcaattgctgctaattcaggcatttattctggcggcagcagcggcggctcaagcggaagtgaaacacctggaacttccgaaagcgctacgcctgaatcttctggtggatcttctggcggatcttccgcatgcgtcgacactctgaacatcgaggacgaatacaggctccacgaaacttctaaggaacctgacgtgtccttgggatcaacttggttgtccgacttcccccaagcttgggccgagacaggcggaatgggtttggccgtgagacaggccccactcataatcccacttaaggcgacatccactccggtcagtatcaagcagtatccaatgtcccaggaagcacgcttaggaattaaaccacatattcaacgactcctggatcaaggtattctcgtcccatgtcaaagcccttggaatacccctcttctgcctgtgaagaagcccggcacaaacgactaccggcccgtgcaagacctcagggaagtgaataaacgagtcgaggatatacatccgactgtcccgaatccctataatctgctgtcaggtctgccaccaagtcatcaatggtatacagtactggacctgaaagacgcgttcttttgtttgcgactgcatcctacgtctcaaccgctgtttgcattcgaatggcgggaccccgaaatggggatttctgggcagctgacatggactcgtcttcctcaagggtttaagaactcccctacacttttcgacgaagccctgcatcgggatttagctgattttagaatccaacatcctgatctgattctcctgcaatatgttgacgatctgctcctcgctgcaaccagtgaacttgattgtcagcagggaacgagagctttactccagactctgggcaatcttggttaccgtgcttcagctaagaaggctcagatatgtcaaaagcaagtgaaataccttggttacctgttgaaggaagggcaacgctggttaaccgaagctcgcaaggaaacagtaatgggccaacccacacccaaaacaccccgccagctgagagaatttctcggtacagctggattttgcagactgtggattcccggtttcgccgagatggccgcacctctttatccactgacgaagactggtaccctcttcaactggggacccgatcagcagaaagcttaccaggagattaaacaggcactgctgaccgctcccgcgctcggcctgcccgacctgacgaaaccattcgagcttttcgtggatgagaaacaaggatatgctaagggagtgctgactcagaagcttgggccgtggcgacgcccagtagcttatctcagcaagaaactggatcctgtggccgccggttggccgccatgtttgagaatggttgccgctatcgcagtcctcaccaaagacgccggtaaactgacaatggggcaacctctggtgatcctcgctccgcacgctgtggaagccttagtgaagcagccacctgataggtggttaagcaatgcgagaatgacccattaccaagcgttattgctggataccgatagagtgcaatttggccccgttgtcgctctcaatcccgcgactcttctgcccttaccagaagagggacttcagcataattgtttggacattctcgcagaggctcatggcactcggccagatctcaccgatcaaccccttcctgatgctgatcatacttggtatactgacggctcatccctgctgcaggaaggccaaagaaaagccggcgccgctgtcacaacagaaactgaagtgatttgggccaaggcactccctgcaggaactagcgcccaaagagccgagctcatcgcccttactcaagctctcaaaatggccgagggcaagaaacttaacgtgtacacagactccaggtacgccttcgccacagcacacattcacggcgagatctatcgccgaaggggacttctgacgagtgagggaaaggaaattaagaacaaggatgaaatactggcgctgctgaaggctctgtttctccctaagcggctgtccattattcactgccctggtcaccagaaagggcattccgctgaagccaggggcaataggatggcagatcaggctgcaaggaaagctgcaattaccgaaacgcccgatacgagcacacttcttatcgagaactcttccccttcaggcggtagcaagcggacagcagatggatccgagtttgaatga

SEQ ID NO: 1502 - DNA, 1812 bp, synthetic construct
  source 1..1812: mol_type = other DNA; note = FH-MCP-TGIRT
atggactacaaagacgatgacgacaagtacccctatgatgtacctgattatgctgccagcaatttcacacagttcgtccttgtagacaacggcggcaccggggatgttacagtggccccgagcaatttcgcaaacggcgtagccgagtggatctcctctaatagcagaagccaggcttataaggttacatgctctgtaaggcagtcttccgcacaaaatagaaagtacacaatcaaggtcgaagtgcccaaggttgctacacagaccgttggtggagaggagttgccagtggctgggtggcgctcctacctgaatatggagttaacaatccccattttcgctaccaattcagactgtgaactcattgtcaaagctatgcaaggtcttcttaaggatggtaacccaattccaagtgcaattgctgctaattcaggcatttattctggcggcagcagcggcggctcaagcggaagtgaaacacctggaacttccgaaagcgctacgcctgaatcttctggtggatcttctggcggatcttccgcatgcgtcgacgctctgttggaacgcatcctggctcgtgataatttgattactgccctcaagcgtgtggaagctaaccagggtgcacccggaatcgatggtgtatcaacggaccaactgcgcgactatattcgagctcactggtcaaccattcatgcacaattattagccggtacatacagacctgctcctgtgagaagggtggaaattccgaagcctggcggcggcactaggcaactgggcatccccacggttgtcgataggctgatacaacaggccatccttcaggaactcacaccgattttcgatccagatttctcatcaagttctttcgggttccgcccaggacggaacgcacacgatgctgtgcggcaagcccaaggttatatacaagagggctaccgttatgttgtggacatggaccttgagaagttctttgacagagttaatcacgatatactcatgtcacgggtcgccaggaaagttaaagataaaagggtacttaagttaataagagcatacctgcaagccggcgtgatgattgaaggggtgaaggtgcaaaccgaagagggtaccccacagggtggtcccttatcccctctcttagccaatatattgctggatgatcttgacaaggagcttgagaagcgaggcttgaaattttgtcgatacgccgacgattgtaatatctatgtaaaatccctgcgcgcagggcagagagttaaacagtccatccaaagattcctggagaagactttgaaacttaaagtaaacgaagaaaagagtgccgtagaccgcccgtggaagcgtgcttttcttggtttcagcttcacccccgagcgtaaagcccgcattcggttggctcctagatctatacaacggttgaaacaacgaatccgacaattgacaaatcctaattggtccatttctatgcctgagcgtattcatcgcgtcaatcaatatgtgatgggttggattggatattttagacttgtggaaacacccagtgtcttacaaacaatagagggatggatacggcgaagactgagattatgccagtggctgcaatggaagagggtacggacccgaatcagagaattacgcgctctgggactgaaggaaactgcggtaatggagatcgccaacaccaggaaaggtgcgtggagaaccacgaagacaccccaacttcatcaagccttgggcaagacttactggaccgcacaagggctcaaaagcttgactcaacggtactttgaactgagacaagggtga

SEQ ID NO: 1503 - DNA, 4722 bp, synthetic construct
  source 1..4722: mol_type = other DNA; note = FH-MCP-R2Tg
atggactacaaagacgatgacgacaagtacccctatgatgtacctgattatgctgccagcaatttcacacagttcgtccttgtagacaacggcggcaccggggatgttacagtggccccgagcaatttcgcaaacggcgtagccgagtggatctcctctaatagcagaagccaggcttataaggttacatgctctgtaaggcagtcttccgcacaaaatagaaagtacacaatcaaggtcgaagtgcccaaggttgctacacagaccgttggtggagaggagttgccagtggctgggtggcgctcctacctgaatatggagttaacaatccccattttcgctaccaattcagactgtgaactcattgtcaaagctatgcaaggtcttcttaaggatggtaacccaattccaagtgcaattgctgctaattcaggcatttattctggcggcagcagcggcggctcaagcggaagtgaaacacctggaacttccgaaagcgctacgcctgaatcttctggtggatcttctggcggatcttccgcatgcgtcgacgcatcatgtcccaaacctggcccacctgtttcagccggtgcaatgagtcttgaatccgggttgacaactcatagcgtccttgcaatagaacggggccctaattcattagccaactccgggtctgacttcggcggtggcggccttgggctccctttgcggcttttgcgtgtgtccgtagggacacaaaccagtcggagtgattgggtggacctcgtcagctggtcccaccccggacccacatctaaaagtcaacaagtagacctggtatccttgtttcctaaacatagagtcgatctcctctcaaagaacgaccaagtggacttggtggcacaatttcttcccagcaaatttccccctaacttagcagagaacgatttagcgcttctcgttaatttggaattttataggagcgacttgcacgtctatgaatgcgtgcattttgccgcccattgggaaggcctgtcaggattgcccgaggtctatgaacaactggccccacaaccctgcgtaggagaaactctccactccagcctgccccgcgacagtgaacttttcgtgccggaagaaggctcttctgaaaaggaaagtgaagacgcccccaagacgtctccaccgacacccgggaagcatgggctggagcaaactggagaagagaaagtgatggtaaccgtacctgataagaatcccccgtgcccttgctgcggaaccagggtgaatagcgttctcaacctgatagagcatcttaaagtatcacatggaaaacgtggagtgtgcttccgttgtgctaaatgtggtaaggaaaattcaaattaccacagcgtcgtgtgccattttcctaagtgtaggggcccagagacagagaaagctcctgccggggaatggatctgtgaagtctgcaacagggactttaccactaaaatagggctgggccaacacaagcggttggctcacccagcagtcagaaatcaggaaagaatcgtggcgagtcaacctaaagaaaccagcaatcggggcgcacataagcggtgttggaccaaggaagaagaagaacttctcattcgactcgaggcacaatttgaaggcaacaagaatataaacaaactgatcgccgaacacataacaaccaagacagctaaacaaatttcagacaagcgccgacttttatccagaaaacccgcagaggaaccacgagaagaaccagggacatgccatcatacccgccgcgctgccgcaagcttacggactgagccggaaatgtctcatcatgctcaagctgaagaccgcgacaatggccctggccggcgtcctctgcctggtagggcagcagcaggtggacgtacaatggatgaaatcaggagacatcccgataaagggaatggccagcaaaggccgaccaaacagaagagcgaggagcaacttcaagcctactataagaaaacattagaagaacgtctctccgctggcgccctcaatacatttcctagagcttttaaacaagttatggaaggcagagatattaagctggtcattaatcaaaccgcccaggattgttttggctgcctcgaaagcatttcccaaataagaaccgctacccgagacaagaaagacaccgtcacccgagagaagcacccaaagaagcctttccagaaatggatgaaggatagagcgataaagaaaggcaactatctgcgttttcaaagactgttctatttagatcgcggaaagctggcaaagattattctcgacgacatcgaatgccttagctgcgacattccactctctgagatatatagcgtctttaaaacaagatgggaaaccacgggcagctttaagtccctcggggattttaaaacatatggaaaagctgataacaccgcgtttcgagagctgataacggccaaggagattgaaaagaacgtgcaagaaatgtccaagggttccgccccagggccagacggcataactctgggcgacgttgtgaaaatggacccggagttcagtaggacaatggagatctttaacttgtggcttacaactggaaagatacccgatatggtaagaggatgcaggaccgtgctgattcccaagtcaagtaaacccgatcgattaaaggacatcaataactggcgacctattacaattggcagcatactgctgcggctctttagtcgaatcgttactgccagactcagcaaagcgtgtcctctcaacccccgtcaaagaggttttatccgcgctgctggctgcagcgaaaatcttaaactccttcaaacaattatttggtccgccaaacgcgagcatcgcccccttggtgtggtatttgtggatattgcaaaggccttcgacaccgtgtctcaccaacatatcatacacgctctccaacaaagagaagtggacccacatattgtcgggctggtcagcaatatgtatgaaaatattagcacatatattactacaaaacgtaacacacatactgacaaaatccaaatccgcgtgggcgtgaaacagggagatccgatgtcccctctgctgttcaacttagccatggaccctctgctgtgcaagcttgaagaatcaggaaaaggctaccaccgcgggcaatcaagcattactgcgatggcatttgcagatgatctggtccttctcagtgatagctgggaaaatatgaataccaatatttctatcctggaaacattttgcaatctgactgggctcaagacccaaggacagaagtgtcacggattttatataaagccaacaaaggactcatatactatcaatgattgtgctgcgtggaccattaatgggactcctcttaatatgataaatcctggtgagagcgagaaatacctgggcttgcaatttgatccctggataggtatagcccgctctggactctccaccaagctcgacttttggttgcaacggatcgaccaggctccactgaagcctctccagaaaacggacattctgaaaacttataccattcctcgacttatttacatcgcggatcactctgaagtgaaaacagcattgctggagaccttagaccagaagattcgcacagccgtcaaggagtggcttcacctgccgccttgtacttgcgatgccatcctttattcctctacgcgagatggcgggctggggataacgaagctcgctgggttaatccccagtgtgcaagccagacgactccaccgtatcgcccaatccagtgatgatactatgaaatgttttatggaaaaggagaaaatggaacaattgcacaagaagctttggattcaagcaggcggcgatcgagagaatatcccctctatatgggaagccccacccagctctgagccaccaaataatgtgtccactaatagcgaatgggaagcacccacccaaaaggataaattccctaagccctgtaattggcgcaagaatgagtttaagaaatggactaagctggcaagtcaaggacgaggaatagtaaatttcgagagggataagatcagtaaccattggattcagtactataggcggattccgcatagaaaacttcttacggcccttcagctccgcgccaacgtctaccctacccgtgaatttcttgctcgaggaaggcaagatcaatatattaaagcctgcagacattgcgatgccgatatagaaagttgtgctcacataatcgggaattgtcctgtcacgcaggatgcgcgcatcaagagacataattacatctgcgagcttctgctcgaggaagcaaagaagaaggattgggtcgtattcaaagagccacacataagagattcaaataaagagctttacaaacctgacttaattttcgtaaaagatgcacgagcattggtagtagacgtgactgtcagatacgaggctgccaaaagctccttggaagaggccgcggctgagaaggtgcgaaaatacaagcaccttgaaacagaagtcagacacctgactaatgcaaaagatgtgaccttcgtcggatttcccctgggagcccggggaaaatggcaccaagacaactttaaattgcttactgaacttgggctttccaagagtcgccaagtgaaaatggcagaaacattctctaccgtcgccctcttttccagcgtggacatcgttcatatgtttgcatctagggcaaggaaatccatggtcatgtga

SEQ ID NO: 1504 - DNA, 3414 bp, synthetic construct
  source 1..3414: mol_type = other DNA; note = FH-MCP-MG148-1
atggactacaaagacgatgacgacaagtacccctatgatgtacctgattatgctgccagcaatttcacacagttcgtccttgtagacaacggcggcaccggggatgttacagtggccccgagcaatttcgcaaacggcgtagccgagtggatctcctctaatagcagaagccaggcttataaggttacatgctctgtaaggcagtcttccgcacaaaatagaaagtacacaatcaaggtcgaagtgcccaaggttgctacacagaccgttggtggagaggagttgccagtggctgggtggcgctcctacctgaatatggagttaacaatccccattttcgctaccaattcagactgtgaactcattgtcaaagctatgcaaggtcttcttaaggatggtaacccaattccaagtgcaattgctgctaattcaggcatttattctggcggcagcagcggcggctcaagcggaagtgaaacacctggaacttccgaaagcgctacgcctgaatcttctggtggatcttctggcggatcttccgcatgcatggcagctaacctcgtgacgatatcttacaacctccatgggtacaatcaaggctgtccgggtattaatgaattgatcctcaagctccgccctgacatttttatggtacaggaacattggctctctcccgacaatctcagcaaactggacaatatatccgactgctacttcgtgtttgggagtagtgctatgctcgattgcgtttcatcaggcccccttgtcggcagaccctttggtggcactgcctttctcataaacaagaaacatgtgtcagccacttctaatgttgaatcctcagacaggttcaccgtgattagaatctataattggctgttaatcaacgtgtatctgccctgtgtgggtacaccacatcgcgatgaattatactccgacatcttgctgcagttgcagaacataatatccgccaattccgactgttcctgtttaatcggaggggactttaacgtggaccttgatggaaacagcaatatctccctgctggtaaatgagtttatgtgtcataataatatgcacagatgcgatgtccttttcccagtgtccaacaggaacactttcatgaacgaagctactaacaccggaagcgctattgattacatgttgtcaagcacttctgataaaactatcgcctttaacatacttgacctggatatcaatttgtccgatcacagtccaattatggctgtctgtgccttggatatgtctttccttcctctgtctactcagtgcgagtcctgctctccagacgatgtgacacacttgagatgggaccacgcacctttgtgcatgtattacgagcataccagactcctgctgcagcccgtgttgaccaacctggacgccctgctggaaagttcagatagcgctgacgacgtgttctgtgtgggcagtgctgatcagatttactgcaatgtcgtgaatatcttatgtgaatctgctaatctcttcgttcccaaacacaagaaaaacttctacagattctggtggtctcaggaattggatatgctgaaaagtaaggcaattgaatcctcacgggcatggaagggggctgggaaacccaagcatggatctatcttctctcaatacaaacaagataaactgctttacaaaaaaaggattcgtgaggaatgctttaatgagacaaagtcctacaccaacgatctccatgatgctcttttgtgtaaatccggtcaagccttttggaaaacctggaaaagtaagttcgagtccaaatctacaaacgtgttgcaggtcgatggaactgccgattctggaattattactgacaagttcggaaaatacttcgaggccaattgctctccattttcaccagcacgaaatgaggagttcaaaaagaaatacacagaactcaggagtaactattccggaagtcctattaccgatgaccaggtttttgacgtggaactcatttcccgtctcgtgtccaatatggataaaggaaaggccgcagggctggatgagttaagttctgaacatctcaaatttagccatccaatacttatctgtatattaaccaagctctttaacctgtttattgccaaaggtcacattcccactagctttgggtcatcttacaccgtgccgatcccaaagtgcgatggcagaacaagagcactgtccgtggatgacttccgggggatatctatatcacccgttctgtcaaaactcttcgaactcgccatactggacagattttcaacgtactttacaacatctgatcatcagtttggctttaaaaagcacctgtcctgccgcaatgccatttattgtgtaagaaatgtggtcgagagttttgtgtccaacggctcaactgtgaatgtgtgcgctcttgatctgtccaaggcgtttgacagaatgaatcactacgcattgttcataaagctgattgaaagaaacttccccaccaagctgttgaatgtacttgagacctggttctgcgcctccattacgtgtgtcaagtgggggagaaacgtaagtagctttttttctcttcatgcaggcgtgagacaaggtggcgtcctgtcaccaattttattcagtgtattcatcgatgatatcgtgacaaaagttaaggcggccaatgtcgggtgctatatgtcaactatttgcgcctcaatctttttgtacgcggatgacgtcctgctggtggcacccagcgtcgctgggctgcagagtctgctcaatgtgtgtgaaaatgagctgatcaacctcgatatgcgcattaatgtgaagaagagcatgtgcgtccgctttgggcagcggttcgacgctccctgcgttgagctcgtctctattcatgggggcagtctgaaatgggttagtagctgtcgatatctcggggtttacttcgtgagcgggagaactttcaagtgctgtttccatagtgctaaatctcagttttatagagcatttaattccctgttctcacgcgtaggcagggctgcctctgaggaaattatcttggtgctcatcaacgcgaaatgtatgcccatcctcatgtacgcccttgaagcttgtcccttgctgtctcgggacaagcagtcattccagtttaccattacaagactcttcatgaaattgtttcggaccgggagcccagcggttgtggaagaatgcgagcggcattttaatttcctcccttttaaacagcagctggacattagaaccgctaagtttttacagtcttttatggctagtgaaaactctttatgcctcctcttcgaatctaatgctcggttgcagctttccagtatctacagcaactatggccatactattcgaacagtttgccaactggttaacaaaatccacgaacagtacttttgctga

SEQ ID NO: 1505 - DNA, 3468 bp, synthetic construct
  source 1..3468: mol_type = other DNA; note = FH-MCP-MG148-2
atggactacaaagacgatgacgacaagtacccctatgatgtacctgattatgctgccagcaatttcacacagttcgtccttgtagacaacggcggcaccggggatgttacagtggccccgagcaatttcgcaaacggcgtagccgagtggatctcctctaatagcagaagccaggcttataaggttacatgctctgtaaggcagtcttccgcacaaaatagaaagtacacaatcaaggtcgaagtgcccaaggttgctacacagaccgttggtggagaggagttgccagtggctgggtggcgctcctacctgaatatggagttaacaatccccattttcgctaccaattcagactgtgaactcattgtcaaagctatgcaaggtcttcttaaggatggtaacccaattccaagtgcaattgctgctaattcaggcatttattctggcggcagcagcggcggctcaagcggaagtgaaacacctggaacttccgaaagcgctacgcctgaatcttctggtggatcttctggcggatcttccgcatgcatgatggcggctttaagtaattcaacacatctgattggaaacagcaattgtaccggggcgcgtcttgtggtgatttcttacaatctccacgggctgaaccaaggtatgaccggcatccgcgagctcatccgccatgtcaatcctgacgttatcatggtacaggaacattggctgacatctgataacttgtttaaactgtccgatattagtgacaagtacttcgtgttcggctcaagtgcaatggatgcccgggttagtgctggcccattagtcggccggccattcggaggaaccgctatgttgatcaaaaatagttttgtgaatattaccgtggggattgccacttgtgaaaggttcactgcaattaaactcgccaattggttactggtgaatgtgtatttaccctgctctggaacagatcagagactgctgatttattccgatgtcttgtgcgaagtgcagtctctgataacagctcactccgattgtgactatctcgttggaggtgattttaattcagacctgacagacgccaagtcccacgcgagtaaccatatgatcaacgacttcatcgttaccaataacttatgccgatgcgacgtagtctttcccgtcgccaccaaatatacctacattaacgaatctctcgattgttctagtacaatcgactatatgctcacctccaactgtgacagcacgatcgcttttaatattgtcgacctggacttgaatctttccgaccatcttcctatattggtggtgttggccctgaacgccgatctgagcaacgcaacatgcaacgctaatccctccgttgacgtgactcacctgaggtgggatcacgcgcagatcaatgaatattacgatctgacaagactgggcttggatccagtattgtgtgagttgaccgttgtgattaataaccttcactgcgccccggaatctatggtgagtgatcaaatcgacgcattgtatgagcgggttgtaaacgtgttatctcaatgcgcagatcagtgtgtacctaaacagatcaagaatttttttaagttttggtggtcacaggaactggctgaacttaaggaaaaagcaatagcttcatgccgcctttggaaggaagcaggcagacctcggaatggtcctatcaatgtcaaatacagacaagataagctgttgtataaaaaacgaattagggaagagagggccgaagagagcagcagtttcaccaacgatctgcatgaggctctgttgagaaagtctggatctgacttctggaaggtgtggaacagcaagttcgaaaacaaaagttccaagatcatccaagtgggcggaactgccgacagtaatgtaatagtgaactcatttgctaaacacttcgaggaggtatgccaacctttcacagctgcgaggaacgcggaccttaaggcacaatacgacgacgtgagggtgaactacagcacaccaccagttttctcagacgcagagatcttcgacgcagaactggtcggcaacctgctggtgaagatgaaaaatggcaaggccgctggcctcgatgggatcaccagcgagcatcttaagcattctcacccatctgtagtggtcatattgtgcaaactgtttaatctttttattgctacaggacacatcccaataagcttcgctgcatcctacacagtaccaataccaaaatgtgacggaagatcaaagagtttagaggtcaacgatttccggggaatttctatttcaccagtcattagcaagcttttcgaactgtgcgtccttgaaagatatcgtgattacttcgacacaagcgatcatcagtttggctttaagaagactctctcctgcagtcatgtgatctactcagtgcgaaccgtcattgaaaattttatcagcaatgggtccaccgttaacttgtgcgctttagacctgagcaaggcctttgaccgcatgaatcactatgccttgttcataaaattaatcaagaggaaattccccgtggagattcttcagattttagaacactggttttgtggatctaagacatgcgtcagatggggcggacaagtgtcctatttcttcgccatggtcgccggggtaaggcagggcggcgttctgtctccagtgctcttctcaatcttcattgacgatattgtgaacaaggtgaaattagccaacgtgggatgttatttatctaatatttgtgtatccatttttctttatgcagatgatatcctgctgattgcccctaccgttacaggtttgcagactctgttaacggtttgtgagcaagagctgctcgagctcgacatgaagctgaacgtggataagtccgtatgtatacggtttggagatcagttcgacgcaagctgcaccgacatcatgtccgtccagggcggcagacttttatgggtcgattcatgccgctacctgggggtctactttacctcaggcagggttttccggtgctgctttcacaatgctaagtgttcttttttcagatcatttaatgccatctttagtaaggtggggcgattcgcctctgagcaggtgatcctgagtctcctgcgtactaaatgcctgcctattcttttatacggactggaggcctgcccagttctgaagtctgacaaacatagcctgaactttaccctgaccaggctcttcatgaagttattccgcaccggcagcccagcggtggtggccgagtgtcagctccagtttaattttctccctttgcagtaccaggtggacatacggactgcaaagtttttgttcaggtttctgaatagcgccaacagcctgtgcatccttctcagtgttcatgctaaggcacagctgacgtccattttatcttcatacggagaggatgtgtcttcaatttatgatttgcatgtggcaatctcagatatcttggtcgcataa

SEQ ID NO: 1506 - DNA, 3453 bp, synthetic construct
  source 1..3453: mol_type = other DNA; note = FH-MCP-MG148-3
atggactacaaagacgatgacgacaagtacccctatgatgtacctgattatgctgccagcaatttcacacagttcgtccttgtagacaacggcggcaccggggatgttacagtggccccgagcaatttcgcaaacggcgtagccgagtggatctcctctaatagcagaagccaggcttataaggttacatgctctgtaaggcagtcttccgcacaaaatagaaagtacacaatcaaggtcgaagtgcccaaggttgctacacagaccgttggtggagaggagttgccagtggctgggtggcgctcctacctgaatatggagttaacaatccccattttcgctaccaattcagactgtgaactcattgtcaaagctatgcaaggtcttcttaaggatggtaacccaattccaagtgcaattgctgctaattcaggcatttattctggcggcagcagcggcggctcaagcggaagtgaaacacctggaacttccgaaagcgctacgcctgaatcttctggtggatcttctggcggatcttccgcatgcatggcttcagaacagatcaacttgagagactgcgactctgctgagaaactcatagtcatttcttacaacctccacggattgaaccagggtagacccgggattacagagcttattagcctgctctctcccgatgctatcatgattcaggaacattggttgacaccggacaatatgtacaagcttgaccagctttctgacaattacctggtgtttgggagttcagctatgaatgattgtgtgctttctggaccactgatcggacgacccttcggcgggacagccatcatcatcaagaagtcacttgcaagcgctacaaagaacatcattagttccgacaggtacaatgttgttaagatcgccaattggttattgtttaacgtgtatatgccctgtgtgggaaccgactatcgcgaatatttgtatgtggaaatactcagcgagttcgattccctgttggccgctaaccctaactgctcctgcctcgttgggggagatttcaacacctgtctggataatccagtgaatgtctccgtcacgataaatactttcattgctaacaatatgctgcacagatgcgacattctctttccctccaataacaaattcaccttctttaatgaaagtactcattcaggaacagctatagactacatgcttgcaagtgatcccaatgatataatcgcctttaatgtccttgacatggacataaacctcagtgatcaccacccaattatggctgtttgtgcatgtcctaagctgtccatcgatcctagcagttgccagaccaacctgccagagattcaacatttccgctgggatcatgctcaacttgacaactattacgaacacacacgccgcctgcttcaacctgtatacgatgagctgaatgtgctggcctgttgtcacgtcagcctggacgccatgatcgttgctgataagatcgactccatatataaccgctttgtgacagcattatgtgtgagtgcagaaaagttcatccctaaacatcggaagaatttctataagttctggtggtctcaggagttggatgccttgaaggagaagtcaatagcatcttgtcgcaaatggaaagaggcaggaaagccgcgcaacggcccaattcaagcacagtataagaaagacaagttactctataagaagtgcatcaaagaggagcaggccgcagagacctgttcattcacaaatgacctgcacgacgctctcctctgtaaatctaaccaggacttctggaagacctggcggtcaaaattcagcaacaactctaataatatcattcaagtggatggtattgccgacggagctgctatagccaataactttgctaattttttcgaatctaattcaaaacccttttctgactcccggaacgccgagctcaaagctcagtacacagagcttcgcgccgattactgtggatgtccagtgaccgataacgaattattcgacgtggagttaatcggcaaactgatcaccgagatgaaaaataacaaggccgctgggttggatgagctcacatgcgagcacttgaagttttctcatcctattgctatctgtattcttacgcaactgttcaacctttttatcgctcttagccatattccgagctcttttggagcgagctatacagtccccattccaaagtgcgatgggcgtacacgggctatgtctgtcgatgactttagggggatcagtatttcacccgtcatttccaaggtgttcgagatggcggtgctggacagattcgcgccttactttcggacttctgatcaccagttcggatttaagcggaatatcggttgtcgcgaggctatttacagtgtgcgcaacgtcattgagacatttatctccaatggctctaccatcaacgtgtgtacactcgatttaagcaaagcgtttgatcgcatgaaccattatgccctgctgattaaactgatcgagagaaaactgccattccagctcttgattgttttagaaaattggttcctcatcagtatcacatgcgtgaagtggaacggccacgtgtcccatttcttccgcctgttgcttggggttaggcagggcggggtacttagccctctccttttcgctatttttgtcgatgatattgttattagagtcaagtccacacacgcaggatgctatatatcccttgtctgttgctgcatcttcttgtatgctgacgatattctgctggtaagcccaacagtgagtggcctgcaaatcttgcttaacgcctgtgagaatgagttgaccgagctggacatgaagataaatgtgaagaaatctatgtgcataagattcggaaaacgctttgatgtccactgcgcagagcttgtcagtgttcagggaggccctatactgtgggtcgactcttgcagatacttgggggtgtacttcctttccggaaggtcctttcggtgctcactggatgatgcaaaatctcgcttttttagagcctttaatgcaatatactccaaagtcggtcactttgcatctgagaccgttatcctgaatctcattcgcaccaagtgtttgcccattctgttatacgctacagaagcctgtcctttacttagcagacagaaacactctctggagtttaccgtgacaagaattttcatgaggattttccatacaggaagtatggatatcgttaagcagtgtcagtgcaattttggatttttgtcagtgtcttaccagctgtctgtccgtacagctaggtttctgcagaagctggtagcttcagagaacagcctctgcctgcttttctcccggaccgcctccgatcagctggcaaagatattttctttctttgacgaagatataaagactgcctgccagctgaataattttttatacgagcttctcagcgtgtcctttaactga

SEQ ID NO: 1507 - DNA, 3471 bp, synthetic construct
  source 1..3471: mol_type = other DNA; note = FH-MCP-MG148-4
atggactacaaagacgatgacgacaagtacccctatgatgtacctgattatgctgccagcaatttcacacagttcgtccttgtagacaacggcggcaccggggatgttacagtggccccgagcaatttcgcaaacggcgtagccgagtggatctcctctaatagcagaagccaggcttataaggttacatgctctgtaaggcagtcttccgcacaaaatagaaagtacacaatcaaggtcgaagtgcccaaggttgctacacagaccgttggtggagaggagttgccagtggctgggtggcgctcctacctgaatatggagttaacaatccccattttcgctaccaattcagactgtgaactcattgtcaaagctatgcaaggtcttcttaaggatggtaacccaattccaagtgcaattgctgctaattcaggcatttattctggcggcagcagcggcggctcaagcggaagtgaaacacctggaacttccgaaagcgctacgcctgaatcttctggtggatcttctggcggatcttccgcatgcatggcaacgaagtacagcaattgtgcatccgacaatacatgcaacacgcccgtccaccggcttgtggtcgtctcttacaacctccatggctataatcaagggtgcccaggcattttggagctcatgtccaagataacccccgatgtgatcatggtccaggaacactggctgactccagataatcttcacaaactcaatgatctgtctaatgattactttgtctttggcagctctgccatgtccgaaagagttgccagcggtccactgtacggacgaccctttggcgacactgccatttttataaacaacaaatacgcctccgtcacaactaatcttgtgtctcgcgacagatataccgccatcaaaatcgcgaattttatgttaatcacagtctacatgccatccgttgggaccgcacaacgggatttcttatgtagcgaactcttggctgaattggacgcagtgctgtcaagtaattccaattccaactccaattgccaatttctgatcggcggcgactttaacaccaatctggactcaaacgctaaagtttccttggccataaatgagttcatttccaacaactcaatttaccgatgtgacgagattttcgacgtagccgattcatatacgttttgtaacgaaacggcacactgtttcagcactatcgactatatgctcacaagctgtgcccaagacattattgcctttaatgtcgttgacatggacatcaatcttagtgaccacaaccctatactgagtgtctgctcttgttgcattgataccagaagcgtcaataaaaacgaaaaaagcgccgatttgtacgccgagttctttcggtgggaccatgcgcctgtggataagtactacgaccagactcgcgttctgatgcaacctgtactggacgagatctccagtctggtcattaacagtgcttatatggataaggagtccatcgctatagcttcagactcaatctacgacaacttggtagatgctatgaggagctccgctaacttatttatccccaagcatcgcaaaaatttttttaagttctggtggagtcaagagctggacgaactgaaggaaaaagcaatcgttagttgcagggagtggaagtcagccggtaagcccaaaagtggagtgacattccaacagtacctgaaggataaggcactttataagaagtctattcgctatgaacagcagagagagaagagttgttatacaaatgatctccacgaagcactgcttcataaaaatggccaggatttttggaaggtgtggaagagtaaattcgagataggatccacaaataccattgtggacggactcgccgacagcgccgctatcgccaataagttcgcccagcacttggagagcaattgtcgcccatttaactctgaacgcagtgccgccctcaagattcaatatattgatcagagggcacagtactgtggcaccccgataactgactgccagtggtttgacgtcgaacttatcgaccggttaacccgcgagatgaagaatggcaaggctgcaggactggacgagattttctgtgagcacctgaagttaagccatccgatcgtggtttgtatcctttctaagctgttcaatctctttttatccaccgggcatattccagcctcttttggagtgtcatacaccgtgccgattccaaaatgcgacggacgaactcgagcacttacagtggatgactttaggggcatctctattagtccggtgattagcaaactgtttgaaatggctgttcttgatcgttttagtcattatttcgtaacctccgattaccagtttggttttaagaagcatctgagttgctctaacgccatcttttgtgtccggaacgttattgaaaactttgtgagccggggtaccaccgtaaatgtgtgtactttagatcttagcaaagctttcgaccggatgaaccattacgccctcttggttaagctgatgagtcgcaagatccctgatctgttgctgtgcatcttcgaattgtggttcagtatcagtgtcacatgcgttaagtgggacaatcactttagtcactttttcttactgatcgtgggtgttcgacaaggaggcgtgctctctcctgtcctctttgcaatcttcattgacagcatagtagataaagtaaaatctaccaacgtgggatgctacatctccctcatatgctgctgcatctttctttatgcagacgatatcatattaattgcaccctcaatccacgccctgcagacgctgctgaatgcctgcgaagatgaattgttcgttctggacatgtgtgtcaacgtgaagaagtcagcctgcattagattcgggactaggcacgatgcccagtgttgtgaaattattagctcatttggaggtagtatcaagtgggtggaatcttgccggtacctgggtgtcttccttgtgagcgggcgaaattactcatgctcttttcacgacgccaagtcacgattctttcgggccttcaacgcagtgttcggcaagatcggaagaattgccagcgaggaggtcgtgctgtctctcctcaaggccaagtgccttcccattctgttgtttgccaccgaggcctgtcctctgctctcccgtcagaagacctcatttgactttacgctcaccaggatcttcatgaagctgtttaatactggatctgctgtcatcgcaaaagaatgtcagaacttgttcaactttctgccaattcgtatgcagctctctatccgaaccgctagattcctgcagaaattcgcagcttgcgagaataatttgtgttccctcttcgcagacatagccgttaagcagctcaacgtcttattcagcgaatataatgtgaagactgcttgtcagctggctaacgcaatttaccgcaaactgagtgagacgttgaactaa

SEQ ID NO: 1508 - DNA, 1341 bp, synthetic construct
  source 1..1341: mol_type = other DNA; note = FH-MCP-MG160-1
atggactacaaagacgatgacgacaagtacccctatgatgtacctgattatgctgccagcaatttcacacagttcgtccttgtagacaacggcggcaccggggatgttacagtggccccgagcaatttcgcaaacggcgtagccgagtggatctcctctaatagcagaagccaggcttataaggttacatgctctgtaaggcagtcttccgcacaaaatagaaagtacacaatcaaggtcgaagtgcccaaggttgctacacagaccgttggtggagaggagttgccagtggctgggtggcgctcctacctgaatatggagttaacaatccccattttcgctaccaattcagactgtgaactcattgtcaaagctatgcaaggtcttcttaaggatggtaacccaattccaagtgcaattgctgctaattcaggcatttattctggcggcagcagcggcggctcaagcggaagtgaaacacctggaacttccgaaagcgctacgcctgaatcttctggtggatcttctggcggatcttccgcatgcatgccctacaactatgacctgtgcttcaagacccctcagaatagatggatttttgtgcccacctcagaatgtcgcgataacgggtatgagtacgtgaaactgatcaggcggaagtggacactccctaatttttactatcacttgaaggctggcggacatattgccgcattgaaactccacgagggaaacaattatttcgcaaagatcgacatcaagagcttcttcccctctatctcaaaagccaaggtgattcgagccctgaaggacattggcatcaattacaaacttgccgaactgatcgcttcctggagcaccgtaaaaagtaaagagaactccaccaagtatatcgtgccgtacggcttcgtgcagtctcagattattgcatctctgtgcctggacaagagtgctataggtagctttatcaaaaataagcttccaacggacgtcaaggtctccgtttatgttgacgatattatcctcagctctaataacccatcagcactgcaggatatctacaatcaaatcattgccacattcgacaaaacagggtttacagtcaacactgaaaaatcccatgaggtgctggatcagactactacgttcaacatagtgatgaacgctgaggatatgcaaattaccgaggataggtttactgattttgagagcgccataacacctttgaacatcaagagatccgaagcgatcataaactacgtatctagtgtttgctcaattcagagcgagaccctcaaagaacagcttaagagtatgatcgacaattccaagtgtgcgtga

SEQ ID NO: 1509 - DNA, 1437 bp, synthetic construct
  source 1..1437: mol_type = other DNA; note = FH-MCP-MG160-2
atggactacaaagacgatgacgacaagtacccctatgatgtacctgattatgctgccagcaatttcacacagttcgtccttgtagacaacggcggcaccggggatgttacagtggccccgagcaatttcgcaaacggcgtagccgagtggatctcctctaatagcagaagccaggcttataaggttacatgctctgtaaggcagtcttccgcacaaaatagaaagtacacaatcaaggtcgaagtgcccaaggttgctacacagaccgttggtggagaggagttgccagtggctgggtggcgctcctacctgaatatggagttaacaatccccattttcgctaccaattcagactgtgaactcattgtcaaagctatgcaaggtcttcttaaggatggtaacccaattccaagtgcaattgctgctaattcaggcatttattctggcggcagcagcggcggctcaagcggaagtgaaacacctggaacttccgaaagcgctacgcctgaatcttctggtggatcttctggcggatcttccgcatgcatgcaatggctgcggtattatgaactgtctcccggttcccagaagtatatctacataccaaccgatgagtctcgcttgataggtagtgagatcatcaacgtactgaagtaccggtggaagaaacctgagtacttttaccactttaggcaagggggacatctcagcgctattaaagtgcatttctacgacgaagaaccctgtcagttctccgtgttcgatctctccggatattatcgacagattactcgctcaaaactggtgagagtgttgaaaaaatatgtgggctatgagcaggcactcgactgggctcagaaatccaccgtgctccaaaacggcgatctggggcgaagcattccattggggttcgtgcagtctgggtttctggccagtctggtcctcgacaacagctgccttggaaagacactcagggagatcaataagacccctaatatcagaatttctgtctttgtcgacgacatcgttatcagttcacaagaccacgagttgctgtccttttactctcagaaaatcaaggaagccagtaaaaaatccaaccttacgctccagcataggaagacattttgcaacattgactcaatcaatatcttcaatctgagctacaaaagcggaagcgagattgatttttgcgccgatagggttaacaacttcaaggaaattctcgttaagaattgtgaccgcaaattcgtggtttttggtgtaattatgtacatgctgaaggtcaacgcgaagagaaccctgagcatccttgattctattgtgcaggaaaagggcatatcaaagactggcatactgggcaagttctactacgagcacaagatcaaggaaaatcagaatatcattgagacacttcggaaagtctgtttccagtga

SEQ ID NO: 1510 - DNA, 1317 bp, synthetic construct
  source 1..1317: mol_type = other DNA; note = FH-MCP-MG160-3
atggactacaaagacgatgacgacaagtacccctatgatgtacctgattatgctgccagcaatttcacacagttcgtccttgtagacaacggcggcaccggggatgttacagtggccccgagcaatttcgcaaacggcgtagccgagtggatctcctctaatagcagaagccaggcttataaggttacatgctctgtaaggcagtcttccgcacaaaatagaaagtacacaatcaaggtcgaagtgcccaaggttgctacacagaccgttggtggagaggagttgccagtggctgggtggcgctcctacctgaatatggagttaacaatccccattttcgctaccaattcagactgtgaactcattgtcaaagctatgcaaggtcttcttaaggatggtaacccaattccaagtgcaattgctgctaattcaggcatttattctggcggcagcagcggcggctcaagcggaagtgaaacacctggaacttccgaaagcgctacgcctgaatcttctggtggatcttctggcggatcttccgcatgcatgtctaattacacacccaagtggatacacaggataaccctggagaatggaaagtggatctttgttccaagccaatcatcccgattgagcgggaaagctattgtcaagaaggtaaaactggagtgggcaccacccaagtacttctatcatcttcgccgcgggggccacatcgccgctctgaatgcgcatctcgaaaacaagtatttctctcgactggatatcaagaactttttcggcagcattactgcatccaggattactcggaccctcaaaccttatttcggatacaacctgtctagggatatcgcaaaacaatctacagtgcgcatcccgggactgttggaaagaaagcttatgctgcctttcggctttatccagagtgccatcttggcttcaatctgcttggacaaaagttctctgggtatctttctgaaacggattaagagagacaagagtcttagcctctccgtttacatggacgacatactgattagctccaatgatcagcagcggctcattgaagtcactgccgagttgaagagctatttctcaaaaagtcactgggtgtccaacacgggcaaagaggtgattgctgccgattctatgacagccttcaatatcgatatgctccagtatgagatgagagtgtccgaggagaaaatgaaacagtttgcctttaacttcagcgaaaccgaaaacataaacaagaaaaagggtatctactcatacgtgaagaccgtcaatgacgggcagttgattgaccttgtgtga

SEQ ID NO: 1511 - DNA, 1302 bp, synthetic construct
  source 1..1302: mol_type = other DNA; note = FH-MCP-MG160-4
atggactacaaagacgatgacgacaagtacccctatgatgtacctgattatgctgccagcaatttcacacagttcgtccttgtagacaacggcggcaccggggatgttacagtggccccgagcaatttcgcaaacggcgtagccgagtggatctcctctaatagcagaagccaggcttataaggttacatgctctgtaaggcagtcttccgcacaaaatagaaagtacacaatcaaggtcgaagtgcccaaggttgctacacagaccgttggtggagaggagttgccagtggctgggtggcgctcctacctgaatatggagttaacaatccccattttcgctaccaattcagactgtgaactcattgtcaaagctatgcaaggtcttcttaaggatggtaacccaattccaagtgcaattgctgctaattcaggcatttattctggcggcagcagcggcggctcaagcggaagtgaaacacctggaacttccgaaagcgctacgcctgaatcttctggtggatcttctggcggatcttccgcatgcgttacccagaagtggacccatcgataccagttgaaacccggccgatgggtttttgcccccacagatgaggccaagaagtgcggtgctcacattaagcgcagcgtggcttccaggtggaaggccccaaacttctactatcacctcagaaatggcgggcacgttgcggccgtacggtcccacgaactgagccggtttttcttccgggcagatttggacgatttctttgggagagtgaaccggtctcgcgtgacccggtgccttaaaccttggttctcatacgccgaagcaagggagatggcctcagaatctgtcgtgaagcgacctggagagacagcctttgtgctgccgtatgggttcgtgcagagccctatcctcgcatccttggccctggacaagagtaaactgggtagcctgctgagatcactggacgggggccgcgatttcacggtgagcgtctatgtcgacgacatcattatctctggagacgacgaagctcaacttaaagaggtagcatcccgccttgagagagtggcgagtgaggccctgtttccactcagcagtggcaaaactcagggacccgcctctggagtgactgtttttaacatagaactgtcccatagaatgctcaggattaccgatgataggctcgcttcactgaggctcgactatcaggcgactgcatctgagcattgtaaagctggcatcgtctcctacgtatacagtgtgaatccagatcaggtcgctcaagtgacatga

SEQ ID NO: 1512 - DNA, 1242 bp, synthetic construct
  source 1..1242: mol_type = other DNA; note = FH-MCP-MG160-5
atggactacaaagacgatgacgacaagtacccctatgatgtacctgattatgctgccagcaatttcacacagttcgtccttgtagacaacggcggcaccggggatgttacagtggccccgagcaatttcgcaaacggcgtagccgagtggatctcctctaatagcagaagccaggcttataaggttacatgctctgtaaggcagtcttccgcacaaaatagaaagtacacaatcaaggtcgaagtgcccaaggttgctacacagaccgttggtggagaggagttgccagtggctgggtggcgctcctacctgaatatggagttaacaatccccattttcgctaccaattcagactgtgaactcattgtcaaagctatgcaaggtcttcttaaggatggtaacccaattccaagtgcaattgctgctaattcaggcatttattctggcggcagcagcggcggctcaagcggaagtgaaacacctggaacttccgaaagcgctacgcctgaatcttctggtggatcttctggcggatcttccgcatgcatgcagtggagcagctactacgagctgacccccgggagcaaaaaatacatctacatacccacagaacagtctcgagaactggggaaacttattattgagacaattagaaagcggtggactccgcccgcctacttttttcatctgcgcaaaggtggtcaccttgccgctatcaagcatcatatcgacaaaagttgtaagccacgcaaattctccgtatttgacattagcggatattttggccaggtcactgaaaataagcttagaagggtgcttaaaaatttcgtgtccttcaaagaggcttctcagtgggcttatgattccacggtcaggaagccttcagaggatcggagaaccctgccttatggattcctgcaaagcggcgacctcgcctctctggttctggacaggagttatctcggctgtgagtttcggaagatacaccagaatccaaatatcaaactctccgtgttcgtggatgacataattgcatcatcaagtgatcctattctgttggaagaggcatccaacagcatcatcaatgccgcgaagctttcaaacttcaagtttaaccaggacaagatccgatgcaatgttgatgaaattgagatctttaacatccactgcagtcaggatttcgggttgagcttctctcaagagaagttgaagaaaaactctaccaactccaagaagctctga

SEQ ID NO: 1513 - DNA, 1428 bp, synthetic construct
  source 1..1428: mol_type = other DNA; note = FH-MCP-MG160-6
atggactacaaagacgatgacgacaagtacccctatgatgtacctgattatgctgccagcaatttcacacagttcgtccttgtagacaacggcggcaccggggatgttacagtggccccgagcaatttcgcaaacggcgtagccgagtggatctcctctaatagcagaagccaggcttataaggttacatgctctgtaaggcagtcttccgcacaaaatagaaagtacacaatcaaggtcgaagtgcccaaggttgctacacagaccgttggtggagaggagttgccagtggctgggtggcgctcctacctgaatatggagttaacaatccccattttcgctaccaattcagactgtgaactcattgtcaaagctatgcaaggtcttcttaaggatggtaacccaattccaagtgcaattgctgctaattcaggcatttattctggcggcagcagcggcggctcaagcggaagtgaaacacctggaacttccgaaagcgctacgcctgaatcttctggtggatcttctggcggatcttccgcatgcatgttgattgacaagttttcaaaggaaataggtctgcccagaccaagcgtgcagaaaattgccgccagcgcaaactatctctacaaacactacactataccgaagaggtcagggggagaaagggatatctaccacccgacacctcgcctgaaactcgtgcagcgatggattacccggcatgtgattagagaccttcctgtgtccgacgcagcaatggcttacaggaaagggaaaagtattacagacaacgccagacttcatgccggcaagaggtttctgctgaagatggatttcactgacttcttcccctcaattaaggcccgggatctgcaacccatcctgactagccggggatacgatccagaggatgtgaatttcatcttgaccatctgcttcaaaagtgggtcccttaccataggcgccccttcctctcctgctgtatctaacatcgttatgtttgcccttgaccaggagtttaagggaatcgcagatcgaaggaagctcacctatagtcgctatgctgatgacctcacattcgctggcaatgtacgggggaatttgatcgaggcgaagaaagacgttgagagactcattggtacatgggcctcaccaaacctgaccttgaaccagcgcaaaaccgtcctggtctcttccgcacacagacaaaaagttactggtattacgcttactacggacggcgagatatccatcggacgagagaagaagagggaactccgggctatcgtccatcgcagcacatatcagaaactggagcccgaggtggaagcttacgtccagggctggctggcgtacgccaatagcatcgaaccaaagtttgtggattctctgcgcaagaagttcgacacctatcttgatttttga

SEQ ID NO: 1514 - DNA, 1302 bp, synthetic construct
  source 1..1302: mol_type = other DNA; note = FH-MCP-MG160-8
atggactacaaagacgatgacgacaagtacccctatgatgtacctgattatgctgccagcaatttcacacagttcgtccttgtagacaacggcggcaccggggatgttacagtggccccgagcaatttcgcaaacggcgtagccgagtggatctcctctaatagcagaagccaggcttataaggttacatgctctgtaaggcagtcttccgcacaaaatagaaagtacacaatcaaggtcgaagtgcccaaggttgctacacagaccgttggtggagaggagttgccagtggctgggtggcgctcctacctgaatatggagttaacaatccccattttcgctaccaattcagactgtgaactcattgtcaaagctatgcaaggtcttcttaaggatggtaacccaattccaagtgcaattgctgctaattcaggcatttattctggcggcagcagcggcggctcaagcggaagtgaaacacctggaacttccgaaagcgctacgcctgaatcttctggtggatcttctggcggatcttccgcatgcatgccgatcaatttcaagtttgcctatgagtgcaaaggcaagagaatttttgtgcccaacgatgagtgcgtacgccgaggcgaagcccttattaagtactgctcccaggcagtcgatttcccaagctacttttatcactaccgagctgggggtcacgtcgccgctctgcatagacacctggaacacaggtttttcttccgcatcgacatcgaaaacttcttctactccataagtcgcaaccgggtgagcgcagtcctgcaccatataggctttagaaaagctcgaccctacgctgagtggtcttgtgttaaaaacccatttggtgcccccgcctattctctgccaataggcttcgtgcagagccctatgctcgcttcactggcaattctccggtcccctgtggccgcagccatcgaaagggcggcagccgctggagcgtttgtgagtgtgtactttgatgatttcatcggaagcgctgttgaccgggagcccctcgagaaagccttccaagacattcttcattcatgccaagaagcaaaccttatttccaatcagctcaagctggctaaaccttctgaacatatcttggcctttaattgtgacttgtctcacgggatcgccgaggttgccgaggccagggtggctaagttctttaaggcccctagatcacagtgggcagaggcggcgttccgggagtattgtaatcgggtagcaagaaataaccataagagtgaagggcgcaggttcctgaggtga

SEQ ID NO: 1515 - DNA, 1341 bp, synthetic construct
  source 1..1341: mol_type = other DNA; note = FH-MCP-MG160-17
atggactacaaagacgatgacgacaagtacccctatgatgtacctgattatgctgccagcaatttcacacagttcgtccttgtagacaacggcggcaccggggatgttacagtggccccgagcaatttcgcaaacggcgtagccgagtggatctcctctaatagcagaagccaggcttataaggttacatgctctgtaaggcagtcttccgcacaaaatagaaagtacacaatcaaggtcgaagtgcccaaggttgctacacagaccgttggtggagaggagttgccagtggctgggtggcgctcctacctgaatatggagttaacaatccccattttcgctaccaattcagactgtgaactcattgtcaaagctatgcaaggtcttcttaaggatggtaacccaattccaagtgcaattgctgctaattcaggcatttattctggcggcagcagcggcggctcaagcggaagtgaaacacctggaacttccgaaagcgctacgcctgaatcttctggtggatcttctggcggatcttccgcatgcaagattcagaacaataatttgtgggacaataggtttaagatagccaaaaacggaggcgagacttggatctacgtgccgagcgattcaagtcggaaactgggccttacgatcaagaaacatatttcaagcaactgggacatccccgactatttctaccactttaaatcaggcggccatatcgaagcggcaaaattacatctgaatcactgtcatttcgcttctatcgacctcaaacaatttttcagcagcctctctctgagtagagtcactagggctcttaagaagttctggccttacgaagaagccaggatcttagccaagtatagcgtggtcaaatgcctcgacaatagaaccggccaatgcaccatgatccctttcggcttcgtgcaaagtccaataattgcatccctgtgcctcgagcagtctcatctgggcacagtcctgaataagatttacgaaatgcagggaattaaagtctccgtatacgtggacgatattataatctctggaaacaacctggaacttttggaagaacagtataggtgcttgctgggagcagtggagaagtcaggcctccaaacctcagaatataaaaaccaggaacctagctccgagattacagtgtttaacatgaagcttaagcaccagtcccttgaacttaaggacgaactgatcaataaattccacagtaagttccaggccacggacaatagcaatatccgcgatgggatactgaggtacctggtgagcgtgaatccagaacagtccaagctgtttatcgaaaattccaaatga

SEQ ID NO: 1516 - DNA, 1317 bp, synthetic construct
  source 1..1317: mol_type = other DNA; note = FH-MCP-MG160-28
atggactacaaagacgatgacgacaagtacccctatgatgtacctgattatgctgccagcaatttcacacagttcgtccttgtagacaacggcggcaccggggatgttacagtggccccgagcaatttcgcaaacggcgtagccgagtggatctcctctaatagcagaagccaggcttataaggttacatgctctgtaaggcagtcttccgcacaaaatagaaagtacacaatcaaggtcgaagtgcccaaggttgctacacagaccgttggtggagaggagttgccagtggctgggtggcgctcctacctgaatatggagttaacaatccccattttcgctaccaattcagactgtgaactcattgtcaaagctatgcaaggtcttcttaaggatggtaacccaattccaagtgcaattgctgctaattcaggcatttattctggcggcagcagcggcggctcaagcggaagtgaaacacctggaacttccgaaagcgctacgcctgaatcttctggtggatcttctggcggatcttccgcatgcactattgaagtgcagcgatgggaggataagttcgaaatcaaaccgggtgtctgggtttacgtgccttctgttgaggcccgtaaggtgggcggcaaaatcctccaggctgtgaggaataaatggattccgccactctatttttaccacctccgtaccggaggccatctgaaggcagcccgcttacacttaaaatccgatttctttgccgtggtggatataaaacagttctttcaaagtacgtcaaggagccgtatcacccgagacctgaagtcttacttcacatacagccaggctagagagatctctactttctcaactgtgcggaatctttcccattctcctcataaacacgtgcttccatttggatttgtacagtctcctatcctcgccactctgtgtctggacaaatcctactttggctccctccttagacggttgaacaaacaccatgatctgaagctgtcagtgtttatggatgacgtcattatctctagtaatgatctggcacagctgcaggccgcttatgatgaggctctggtcgcaatgcgtaaatcaggttaccaggcgaacatgagtaagacacaggctccaagtagtaaaatctccgtgtttaacttgactctgagcaaaggtgtgatgaaagttacatctcaaaagatgagtgatttcttgattgacttctatagtagtaattatgaacctcataggatcggagttaaaaattacgttgaggccgtcaatcctggtcaggccaaacttttcaagctctga

SEQ ID NO: 1517 - DNA, 1302 bp, synthetic construct
  source 1..1302: mol_type = other DNA; note = FH-MCP-MG160-37
atggactacaaagacgatgacgacaagtacccctatgatgtacctgattatgctgccagcaatttcacacagttcgtccttgtagacaacggcggcaccggggatgttacagtggccccgagcaatttcgcaaacggcgtagccgagtggatctcctctaatagcagaagccaggcttataaggttacatgctctgtaaggcagtcttccgcacaaaatagaaagtacacaatcaaggtcgaagtgcccaaggttgctacacagaccgttggtggagaggagttgccagtggctgggtggcgctcctacctgaatatggagttaacaatccccattttcgctaccaattcagactgtgaactcattgtcaaagctatgcaaggtcttcttaaggatggtaacccaattccaagtgcaattgctgctaattcaggcatttattctggcggcagcagcggcggctcaagcggaagtgaaacacctggaacttccgaaagcgctacgcctgaatcttctggtggatcttctggcggatcttccgcatgcccgcagaagtgggacacccgtttccaactgaagcctggaacctgggtgttcgttcctaccgacgaagcaagagagctgggttacgtcatcaaagagctggtagagacaaggtggcgaccccccaaaaactatttccacctgactaatgggggacatgtgagggccatctcctcccacgtgcataataccaccttcgcccatctggatatacaggacttcttcggtcacattaacgcaagtagagtaacacgatggcttactcccctcgctggttatgctaaagctcgggagtttgccaaagcatctacagtcccctacccaaatcacggagggaccatgctcccttttggattcgttcaatccccaatacttgcctccctctgtcttttccactcagcactcggtagatgtctcgctgaacttccccggaagttaggagccgtagtttcagtctacatggacgacatcattttaagcgccagcgatcactccgtgctggaacaggctgtgaaaatggtcgaggagagcgccgagagaagtggactcccattaaatcccgataagcatgaaggccccgcagctggtataacagcttttaatatagcattagcacaccagtctctgcgaatcaacgacgaacgttggaactcctttttaaccgagtttcaggcctctgacaacgattcagtccgcaggggcatccattcctacgtgcatagtgtgaacgtggagcaggcgaataacctgggactttga

SEQ ID NO: 1518 - DNA, 1371 bp, synthetic construct
  source 1..1371: mol_type = other DNA; note = FH-MCP-MG160-40
atggactacaaagacgatgacgacaagtacccctatgatgtacctgattatgctgccagcaatttcacacagttcgtccttgtagacaacggcggcaccggggatgttacagtggccccgagcaatttcgcaaacggcgtagccgagtggatctcctctaatagcagaagccaggcttataaggttacatgctctgtaaggcagtcttccgcacaaaatagaaagtacacaatcaaggtcgaagtgcccaaggttgctacacagaccgttggtggagaggagttgccagtggctgggtggcgctcctacctgaatatggagttaacaatccccattttcgctaccaattcagactgtgaactcattgtcaaagctatgcaaggtcttcttaaggatggtaacccaattccaagtgcaattgctgctaattcaggcatttattctggcggcagcagcggcggctcaagcggaagtgaaacacctggaacttccgaaagcgctacgcctgaatcttctggtggatcttctggcggatcttccgcatgcagcctcacatgggttcacaggttcgaaagaaaacctgggaggtgggttttcgagccttctgaggaagccagaaagcaaggcgctgagatcaaagctctgattgagactcattggaaacctccctccttttactttcatctccgccagggcggccatgtggctgctcttagagcacacctcgcttctacttggtttgtgaagctggacatagctgatttctttggatccgttagtagaagcagaattgctaggcttctcaaggagttcgtgccttacagggacgccttgcacatggcaaccagtagtaccgtgcgacatccaacagaagtcagtcgcctgatgttgccatacggattcgtacaatctccagttatcgcgtctctggcattagctaagtctgcgcttggaaagtacctgagaactcttcactctgaccaggatttggtagttaccgtctatatggacgacgtaatcgtttctggtgtggatgagcacaggttagccgatgtcgcccaaaaattggacagtttggccaaacgaagccgcttcgagttgaatgccgataaaactcacgggcctcttgccaaactgagggcttttaatatcgatctggccgacgctgcaatggtaatagccccaaatcggctggaccaattgaaaaatgtgcttgaggaatccaccaatggtttccaaatcgagggaattagatcctatgtcaaaagtgtgaatgaggaacaggcggccgagctcggtgatccgttggctggcactgacacagaaccacatggcgcaagcaaggatgatctcggcaagccacccgcctga

SEQ ID NO: 1519 - DNA, 1308 bp, synthetic construct
  source 1..1308: mol_type = other DNA; note = FH-MCP-MG160-56
atggactacaaagacgatgacgacaagtacccctatgatgtacctgattatgctgccagcaatttcacacagttcgtccttgtagacaacggcggcaccggggatgttacagtggccccgagcaatttcgcaaacggcgtagccgagtggatctcctctaatagcagaagccaggcttataaggttacatgctctgtaaggcagtcttccgcacaaaatagaaagtacacaatcaaggtcgaagtgcccaaggttgctacacagaccgttggtggagaggagttgccagtggctgggtggcgctcctacctgaatatggagttaacaatccccattttcgctaccaattcagactgtgaactcattgtcaaagctatgcaaggtcttcttaaggatggtaacccaattccaagtgcaattgctgctaattcaggcatttattctggcggcagcagcggcggctcaagcggaagtgaaacacctggaacttccgaaagcgctacgcctgaatcttctggtggatcttctggcggatcttccgcatgcgaaacctggaagcataagtttcttctgaaagaaaagaagtgggttcacatccctagcgaggagatgatcaagtatggctctagtttgcacaagtatcttagaagaaactggagatttccgctgtattactatcacctgaggaacggagggcatgtggccgctgctaaacttcataaaagcaatgatttcttttgtctgattgacattaagtgctttttcgaatccaccagccagagcagagtcactcgcgagcttaagaaaatcatcccttacgacaaggccaggcacattgctaaactcagcaccgtgcgacttcccaatgctgtgagacataagtttgcagttccctatgggtacccacagtctcccgtgttagccaccttgtgccttcagaactctcatgccggcacagtcattgatagcttttataggtcaggcattgtgacagtttcagtgtatatggacgatataattctcagttccaaggatctcgccatactgaatcagcactttgagatcctttgcgaggccttgagaaaatctaggtatgagatcaacgtcagcaagacgcagaaaccagccactaaaatcagcgtgtttaatctcgagctggggcatcggcacttaaaggtggagtcaggtcgaatggtactgtttatccaggccttcgctaaaacccggaataagcacgagaaaaagagtatcgccaagtacgtgcatacggtaaaccccgatcaggcggagcgacacttcccaaagtga

SEQ ID NO: 1520 - DNA, 1314 bp, synthetic construct
  source 1..1314: mol_type = other DNA; note = FH-MCP-MG160-64
atggactacaaagacgatgacgacaagtacccctatgatgtacctgattatgctgccagcaatttcacacagttcgtccttgtagacaacggcggcaccggggatgttacagtggccccgagcaatttcgcaaacggcgtagccgagtggatctcctctaatagcagaagccaggcttataaggttacatgctctgtaaggcagtcttccgcacaaaatagaaagtacacaatcaaggtcgaagtgcccaaggttgctacacagaccgttggtggagaggagttgccagtggctgggtggcgctcctacctgaatatggagttaacaatccccattttcgctaccaattcagactgtgaactcattgtcaaagctatgcaaggtcttcttaaggatggtaacccaattccaagtgcaattgctgctaattcaggcatttattctggcggcagcagcggcggctcaagcggaagtgaaacacctggaacttccgaaagcgctacgcctgaatcttctggtggatcttctggcggatcttccgcatgccctctccccaagtggaattgcaagtttcagttgaaaaaggactgttgggtgttcgttcccactgaggatgccaagaaaagaggccagaagattaaggagcaaattgaatctttctggcagcctccaaggtattatttccatctccgcgatggcggccatgttaaagccctgagactccacgagtctaggaagcagtatctccatcttgatattaaggacttttttgggtgcgtcaatcggtcaaaagtcactagagccctgaagagtaggattggatatgatgccgcccgccagatagctaccaatagcaccgtaagggctccaaatgattcaggttatatattgccaagaggttttgttgaaagcccaatactcgccagcatttgtctcagaaatagccgtctcggagactatctccataagctccacgatagcgagcattatgagatcagcgtctatatggacgatataattgtctcagccgacagtgacatccttctgcaggaagctctgaccgagctggaatcaagagctaaccggtcaaaattccccttgaatacacagaagactcagggtccctgtaaacagatctcagcctttaacatcgagctctctccaggggagttgcgggtcaccacagagaggatggctaaatttttggacaattacaaaggcgcagaaagtgacgattgcagaaacggcatcctgaattacgtgaaatctgtgaaccctggtcaaagccaagcactgaaagaggaagactcttga

SEQ ID NO: 1521 - DNA, 1968 bp, synthetic construct
  source 1..1968: mol_type = other DNA; note = FH-MCP-MG153-18
atggactacaaagacgatgacgacaagtacccctatgatgtacctgattatgctgccagcaatttcacacagttcgtccttgtagacaacggcggcaccggggatgttacagtggccccgagcaatttcgcaaacggcgtagccgagtggatctcctctaatagcagaagccaggcttataaggttacatgctctgtaaggcagtcttccgcacaaaatagaaagtacacaatcaaggtcgaagtgcccaaggttgctacacagaccgttggtggagaggagttgccagtggctgggtggcgctcctacctgaatatggagttaacaatccccattttcgctaccaattcagactgtgaactcattgtcaaagctatgcaaggtcttcttaaggatggtaacccaattccaagtgcaattgctgctaattcaggcatttattctggcggcagcagcggcggctcaagcggaagtgaaacacctggaacttccgaaagcgctacgcctgaatcttctggtggatcttctggcggatcttccgcatgcgtcgacatgaggtcacaagagggaagacggcagcagaaagctcctgagggcgcgtacttgtgggaagagatggtgaagccatggggtactactggaggaccaagcccgtcttccgctcagggaggcgcgacccctcgcggggggcagggcagtggtttgatggagcaggtggttgagaggagcaacatgctggctgcgctgcgtcgggttgaaagaaatggaggcgcaccgggagtggacggcatacccaccgagaggctccgcgatcagattcgagccgagtggccaagaatcagggaagaacttcttgccggcacttaccgccctaaaccagttcgccgagtggaaatcccgaagcctggaggaggcaagagactgctgggtatccccacagcggtagaccgccttatccaacaagctctcctccaggtgctgactcctatctttgatcctcaatttagcgaagcctcttatggcttccgacccggcagacgggcccatgacgccgtgaggaaggccagacaatatgtcgaagagggttacgagtgggccgttgacttggatattgagaagtttttcgatcaggtgaaccatgacattttgatggcccgggtcgcgcgaaaggtgactgataagcgcgttctgactttgatccgcaggtatcttcaggcaggtgtcatggtcaacggcgtggttatcgagaccggggaaggcactcctcagggtggtcccttgagccccttactggcgaatatccttcttgatgaccttgacaaggagcttgaaaaacgggggcacaaattcgtgaggtacgcagacgactgtaatatatatgttaagagcaagcgcgctggggaacgagttatggctagtatcagaaaatttctgcaggaacggttgaagcttaaaattaacgagcagaagtctgccgtcgatcggccctggaagctgaaattcctgggtttctccatgcataaacgtaaaaccggtgaaattctcattcggcttgctccccaggctatagagcgtgttaaaggcaaaatccgggagattacagcacgaaacaagcctgtaagtatggccgagaggatcgaacgactgaatacatacttaggaggatggatcggttattttgcattggccgagacccccagcgtctttgaggagatcgaagggtggatgcgacgacggctccggatgtatttgtggaagcagtggaagcgggtccgtactcgctatcgcgaactcagagctcttggcttatctgaatgggtcgtgcaccagttcgctaacgcccgtaaaggtccctggcggatggcccacgggcctatgaatcgagccttaggcaacgcctattggcaaagccagggtcttatgtcactgaccgagcgataccagagcctgcgacaggctgatatctga

SEQ ID NO: 1522 - DNA, 1968 bp, synthetic construct
  source 1..1968: mol_type = other DNA; note = FH-MCP-MG153-18 G161K
atggactacaaagacgatgacgacaagtacccctatgatgtacctgattatgctgccagcaatttcacacagttcgtccttgtagacaacggcggcaccggggatgttacagtggccccgagcaatttcgcaaacggcgtagccgagtggatctcctctaatagcagaagccaggcttataaggttacatgctctgtaaggcagtcttccgcacaaaatagaaagtacacaatcaaggtcgaagtgcccaaggttgctacacagaccgttggtggagaggagttgccagtggctgggtggcgctcctacctgaatatggagttaacaatccccattttcgctaccaattcagactgtgaactcattgtcaaagctatgcaaggtcttcttaaggatggtaacccaattccaagtgcaattgctgctaattcaggcatttattctggcggcagcagcggcggctcaagcggaagtgaaacacctggaacttccgaaagcgctacgcctgaatcttctggtggatcttctggcggatcttccgcatgcgtcgacatgaggtcacaagagggaagacggcagcagaaagctcctgagggcgcgtacttgtgggaagagatggtgaagccatggggtactactggaggaccaagcccgtcttccgctcagggaggcgcgacccctcgcggggggcagggcagtggtttgatggagcaggtggttgagaggagcaacatgctggctgcgctgcgtcgggttgaaagaaatggaggcgcaccgggagtggacggcatacccaccgagaggctccgcgatcagattcgagccgagtggccaagaatcagggaagaacttcttgccggcacttaccgccctaaaccagttcgccgagtggaaatcccgaagcctggaggaggcaagagactgctgggtatccccacagcggtagaccgccttatccaacaagctctcctccaggtgctgactcctatctttgatcctcaatttagcgaagcctcttatggcttccgacccaagagacgggcccatgacgccgtgaggaaggccagacaatatgtcgaagagggttacgagtgggccgttgacttggatattgagaagtttttcgatcaggtgaaccatgacattttgatggcccgggtcgcgcgaaaggtgactgataagcgcgttctgactttgatccgcaggtatcttcaggcaggtgtcatggtcaacggcgtggttatcgagaccggggaaggcactcctcagggtggtcccttgagccccttactggcgaatatccttcttgatgaccttgacaaggagcttgaaaaacgggggcacaaattcgtgaggtacgcagacgactgtaatatatatgttaagagcaagcgcgctggggaacgagttatggctagtatcagaaaatttctgcaggaacggttgaagcttaaaattaacgagcagaagtctgccgtcgatcggccctggaagctgaaattcctgggtttctccatgcataaacgtaaaaccggtgaaattctcattcggcttgctccccaggctatagagcgtgttaaaggcaaaatccgggagattacagcacgaaacaagcctgtaagtatggccgagaggatcgaacgactgaatacatacttaggaggatggatcggttattttgcattggccgagacccccagcgtctttgaggagatcgaagggtggatgcgacgacggctccggatgtatttgtggaagcagtggaagcgggtccgtactcgctatcgcgaactcagagctcttggcttatctgaatgggtcgtgcaccagttcgctaacgcccgtaaaggtccctggcggatggcccacgggcctatgaatcgagccttaggcaacgcctattggcaaagccagggtcttatgtcactgaccgagcgataccagagcctgcgacaggctgatatctga

SEQ ID NO: 1523 - DNA, 1968 bp, synthetic construct
  source 1..1968: mol_type = other DNA; note = FH-MCP-MG153-18 S59R
atggactacaaagacgatgacgacaagtacccctatgatgtacctgattatgctgccagcaatttcacacagttcgtccttgtagacaacggcggcaccggggatgttacagtggccccgagcaatttcgcaaacggcgtagccgagtggatctcctctaatagcagaagccaggcttataaggttacatgctctgtaaggcagtcttccgcacaaaatagaaagtacacaatcaaggtcgaagtgcccaaggttgctacacagaccgttggtggagaggagttgccagtggctgggtggcgctcctacctgaatatggagttaacaatccccattttcgctaccaattcagactgtgaactcattgtcaaagctatgcaaggtcttcttaaggatggtaacccaattccaagtgcaattgctgctaattcaggcatttattctggcggcagcagcggcggctcaagcggaagtgaaacacctggaacttccgaaagcgctacgcctgaatcttctggtggatcttctggcggatcttccgcatgcgtcgacatgaggtcacaagagggaagacggcagcagaaagctcctgagggcgcgtacttgtgggaagagatggtgaagccatggggtactactggaggaccaagcccgtcttccgctcagggaggcgcgacccctcgcggggggcagggcagtggtttgatggagcaggtggttgagaggaggaacatgctggctgcgctgcgtcgggttgaaagaaatggaggcgcaccgggagtggacggcatacccaccgagaggctccgcgatcagattcgagccgagtggccaagaatcagggaagaacttcttgccggcacttaccgccctaaaccagttcgccgagtggaaatcccgaagcctggaggaggcaagagactgctgggtatccccacagcggtagaccgccttatccaacaagctctcctccaggtgctgactcctatctttgatcctcaatttagcgaagcctcttatggcttccgacccggcagacgggcccatgacgccgtgaggaaggccagacaatatgtcgaagagggttacgagtgggccgttgacttggatattgagaagtttttcgatcaggtgaaccatgacattttgatggcccgggtcgcgcgaaaggtgactgataagcgcgttctgactttgatccgcaggtatcttcaggcaggtgtcatggtcaacggcgtggttatcgagaccggggaaggcactcctcagggtggtcccttgagccccttactggcgaatatccttcttgatgaccttgacaaggagcttgaaaaacgggggcacaaattcgtgaggtacgcagacgactgtaatatatatgttaagagcaagcgcgctggggaacgagttatggctagtatcagaaaatttctgcaggaacggttgaagcttaaaattaacgagcagaagtctgccgtcgatcggccctggaagctgaaattcctgggtttctccatgcataaacgtaaaaccggtgaaattctcattcggcttgctccccaggctatagagcgtgttaaaggcaaaatccgggagattacagcacgaaacaagcctgtaagtatggccgagaggatcgaacgactgaatacatacttaggaggatggatcggttattttgcattggccgagacccccagcgtctttgaggagatcgaagggtggatgcgacgacggctccggatgtatttgtggaagcagtggaagcgggtccgtactcgctatcgcgaactcagagctcttggcttatctgaatgggtcgtgcaccagttcgctaacgcccgtaaaggtccctggcggatggcccacgggcctatgaatcgagccttaggcaacgcctattggcaaagccagggtcttatgtcactgaccgagcgataccagagcctgcgacaggctgatatctga

SEQ ID NO: 1524 - DNA, 1968 bp, synthetic construct
  source 1..1968: mol_type = other DNA; note = FH-MCP-MG153-18 P242R
atggactacaaagacgatgacgacaagtacccctatgatgtacctgattatgctgccagcaatttcacacagttcgtccttgtagacaacggcggcaccggggatgttacagtggccccgagcaatttcgcaaacggcgtagccgagtggatctcctctaatagcagaagccaggcttataaggttacatgctctgtaaggcagtcttccgcacaaaatagaaagtacacaatcaaggtcgaagtgcccaaggttgctacacagaccgttggtggagaggagttgccagtggctgggtggcgctcctacctgaatatggagttaacaatccccattttcgctaccaattcagactgtgaactcattgtcaaagctatgcaaggtcttcttaaggatggtaacccaattccaagtgcaattgctgctaattcaggcatttattctggcggcagcagcggcggctcaagcggaagtgaaacacctggaacttccgaaagcgctacgcctgaatcttctggtggatcttctggcggatcttccgcatgcgtcgacatgaggtcacaagagggaagacggcagcagaaagctcctgagggcgcgtacttgtgggaagagatggtgaagccatggggtactactggaggaccaagcccgtcttccgctcagggaggcgcgacccctcgcggggggcagggcagtggtttgatggagcaggtggttgagaggagcaacatgctggctgcgctgcgtcgggttgaaagaaatggaggcgcaccgggagtggacggcatacccaccgagaggctccgcgatcagattcgagccgagtggccaagaatcagggaagaacttcttgccggcacttaccgccctaaaccagttcgccgagtggaaatcccgaagcctggaggaggcaagagactgctgggtatccccacagcggtagaccgccttatccaacaagctctcctccaggtgctgactcctatctttgatcctcaatttagcgaagcctcttatggcttccgacccggcagacgggcccatgacgccgtgaggaaggccagacaatatgtcgaagagggttacgagtgggccgttgacttggatattgagaagtttttcgatcaggtgaaccatgacattttgatggcccgggtcgcgcgaaaggtgactgataagcgcgttctgactttgatccgcaggtatcttcaggcaggtgtcatggtcaacggcgtggttatcgagaccggggaaggcactcctcagggtggtaggttgagccccttactggcgaatatccttcttgatgaccttgacaaggagcttgaaaaacgggggcacaaattcgtgaggtacgcagacgactgtaatatatatgttaagagcaagcgcgctggggaacgagttatggctagtatcagaaaatttctgcaggaacggttgaagcttaaaattaacgagcagaagtctgccgtcgatcggccctggaagctgaaattcctgggtttctccatgcataaacgtaaaaccggtgaaattctcattcggcttgctccccaggctatagagcgtgttaaaggcaaaatccgggagattacagcacgaaacaagcctgtaagtatggccgagaggatcgaacgactgaatacatacttaggaggatggatcggttattttgcattggccgagacccccagcgtctttgaggagatcgaagggtggatgcgacgacggctccggatgtatttgtggaagcagtggaagcgggtccgtactcgctatcgcgaactcagagctcttggcttatctgaatgggtcgtgcaccagttcgctaacgcccgtaaaggtccctggcggatggcccacgggcctatgaatcgagccttaggcaacgcctattggcaaagccagggtcttatgtcactgaccgagcgataccagagcctgcgacaggctgatatctga

SEQ ID NO: 1525 - DNA, 1968 bp, synthetic construct
  source 1..1968: mol_type = other DNA; note = FH-MCP-MG153-18 N71R
atggactacaaagacgatgacgacaagtacccctatgatgtacctgattatgctgccagcaatttcacacagttcgtccttgtagacaacggcggcaccggggatgttacagtggccccgagcaatttcgcaaacggcgtagccgagtggatctcctctaatagcagaagccaggcttataaggttacatgctctgtaaggcagtcttccgcacaaaatagaaagtacacaatcaaggtcgaagtgcccaaggttgctacacagaccgttggtggagaggagttgccagtggctgggtggcgctcctacctgaatatggagttaacaatccccattttcgctaccaattcagactgtgaactcattgtcaaagctatgcaaggtcttcttaaggatggtaacccaattccaagtgcaattgctgctaattcaggcatttattctggcggcagcagcggcggctcaagcggaagtgaaacacctggaacttccgaaagcgctacgcctgaatcttctggtggatcttctggcggatcttccgcatgcgtcgacatgaggtcacaagagggaagacggcagcagaaagctcctgagggcgcgtacttgtgggaagagatggtgaagccatggggtactactggaggaccaagcccgtcttccgctcagggaggcgcgacccctcgcggggggcagggcagtggtttgatggagcaggtggttgagaggagcaacatgctggctgcgctgcgtcgggttgaaagaaggggaggcgcaccgggagtggacggcatacccaccgagaggctccgcgatcagattcgagccgagtggccaagaatcagggaagaacttcttgccggcacttaccgccctaaaccagttcgccgagtggaaatcccgaagcctggaggaggcaagagactgctgggtatccccacagcggtagaccgccttatccaacaagctctcctccaggtgctgactcctatctttgatcctcaatttagcgaagcctcttatggcttccgacccggcagacgggcccatgacgccgtgaggaaggccagacaatatgtcgaagagggttacgagtgggccgttgacttggatattgagaagtttttcgatcaggtgaaccatgacattttgatggcccgggtcgcgcgaaaggtgactgataagcgcgttctgactttgatccgcaggtatcttcaggcaggtgtcatggtcaacggcgtggttatcgagaccggggaaggcactcctcagggtggtcccttgagccccttactggcgaatatccttcttgatgaccttgacaaggagcttgaaaaacgggggcacaaattcgtgaggtacgcagacgactgtaatatatatgttaagagcaagcgcgctggggaacgagttatggctagtatcagaaaatttctgcaggaacggttgaagcttaaaattaacgagcagaagtctgccgtcgatcggccctggaagctgaaattcctgggtttctccatgcataaacgtaaaaccggtgaaattctcattcggcttgctccccaggctatagagcgtgttaaaggcaaaatccgggagattacagcacgaaacaagcctgtaagtatggccgagaggatcgaacgactgaatacatacttaggaggatggatcggttattttgcattggccgagacccccagcgtctttgaggagatcgaagggtggatgcgacgacggctccggatgtatttgtggaagcagtggaagcgggtccgtactcgctatcgcgaactcagagctcttggcttatctgaatgggtcgtgcaccagttcgctaacgcccgtaaaggtccctggcggatggcccacgggcctatgaatcgagccttaggcaacgcctattggcaaagccagggtcttatgtcactgaccgagcgataccagagcctgcgacaggctgatatctga

SEQ ID NO: 1526 - DNA, 1968 bp, synthetic construct
  source 1..1968: mol_type = other DNA; note = FH-MCP-MG153-18 G119R
atggactacaaagacgatgacgacaagtacccctatgatgtacctgattatgctgccagcaatttcacacagttcgtccttgtagacaacggcggcaccggggatgttacagtggccccgagcaatttcgcaaacggcgtagccgagtggatctcctctaatagcagaagccaggcttataaggttacatgctctgtaaggcagtcttccgcacaaaatagaaagtacacaatcaaggtcgaagtgcccaaggttgctacacagaccgttggtggagaggagttgccagtggctgggtggcgctcctacctgaatatggagttaacaatccccattttcgctaccaattcagactgtgaactcattgtcaaagctatgcaaggtcttcttaaggatggtaacccaattccaagtgcaattgctgctaattcaggcatttattctggcggcagcagcggcggctcaagcggaagtgaaacacctggaacttccgaaagcgctacgcctgaatcttctggtggatcttctggcggatcttccgcatgcgtcgacatgaggtcacaagagggaagacggcagcagaaagctcctgagggcgcgtacttgtgggaagagatggtgaagccatggggtactactggaggaccaagcccgtcttccgctcagggaggcgcgacccctcgcggggggcagggcagtggtttgatggagcaggtggttgagaggagcaacatgctggctgcgctgcgtcgggttgaaagaaatggaggcgcaccgggagtggacggcatacccaccgagaggctccgcgatcagattcgagccgagtggccaagaatcagggaagaacttcttgccggcacttaccgccctaaaccagttcgccgagtggaaatcccgaagcctaggggaggcaagagactgctgggtatccccacagcggtagaccgccttatccaacaagctctcctccaggtgctgactcctatctttgatcctcaatttagcgaagcctcttatggcttccgacccggcagacgggcccatgacgccgtgaggaaggccagacaatatgtcgaagagggttacgagtgggccgttgacttggatattgagaagtttttcgatcaggtgaaccatgacattttgatggcccgggtcgcgcgaaaggtgactgataagcgcgttctgactttgatccgcaggtatcttcaggcaggtgtcatggtcaacggcgtggttatcgagaccggggaaggcactcctcagggtggtcccttgagccccttactggcgaatatccttcttgatgaccttgacaaggagcttgaaaaacgggggcacaaattcgtgaggtacgcagacgactgtaatatatatgttaagagcaagcgcgctggggaacgagttatggctagtatcagaaaatttctgcaggaacggttgaagcttaaaattaacgagcagaagtctgccgtcgatcggccctggaagctgaaattcctgggtttctccatgcataaacgtaaaaccggtgaaattctcattcggcttgctccccaggctatagagcgtgttaaaggcaaaatccgggagattacagcacgaaacaagcctgtaagtatggccgagaggatcgaacgactgaatacatacttaggaggatggatcggttattttgcattggccgagacccccagcgtctttgaggagatcgaagggtggatgcgacgacggctccggatgtatttgtggaagcagtggaagcgggtccgtactcgctatcgcgaactcagagctcttggcttatctgaatgggtcgtgcaccagttcgctaacgcccgtaaaggtccctggcggatggcccacgggcctatgaatcgagccttaggcaacgcctattggcaaagccagggtcttatgtcactgaccgagcgataccagagcctgcgacaggctgatatctga

SEQ ID NO: 1527 - DNA, 1968 bp, synthetic construct
  source 1..1968: mol_type = other DNA; note = FH-MCP-MG153-18 Pentamutant
atggactacaaagacgatgacgacaagtacccctatgatgtacctgattatgctgccagcaatttcacacagttcgtccttgtagacaacggcggcaccggggatgttacagtggccccgagcaatttcgcaaacggcgtagccgagtggatctcctctaatagcagaagccaggcttataaggttacatgctctgtaaggcagtcttccgcacaaaatagaaagtacacaatcaaggtcgaagtgcccaaggttgctacacagaccgttggtggagaggagttgccagtggctgggtggcgctcctacctgaatatggagttaacaatccccattttcgctaccaattcagactgtgaactcattgtcaaagctatgcaaggtcttcttaaggatggtaacccaattccaagtgcaattgctgctaattcaggcatttattctggcggcagcagcggcggctcaagcggaagtgaaacacctggaacttccgaaagcgctacgcctgaatcttctggtggatcttctggcggatcttccgcatgcgtcgacatgaggtcacaagagggaagacggcagcagaaagctcctgagggcgcgtacttgtgggaagagatggtgaagccatggggtactactggaggaccaagcccgtcttccgctcagggaggcgcgacccctcgcggggggcagggcagtggtttgatggagcaggtggttgagaggaggaacatgctggctgcgctgcgtcgggttgaaagaaggggaggcgcaccgggagtggacggcatacccaccgagaggctccgcgatcagattcgagccgagtggccaagaatcagggaagaacttcttgccggcacttaccgccctaaaccagttcgccgagtggaaatcccgaagcctaggggaggcaagagactgctgggtatccccacagcggtagaccgccttatccaacaagctctcctccaggtgctgactcctatctttgatcctcaatttagcgaagcctcttatggcttccgacccaagagacgggcccatgacgccgtgaggaaggccagacaatatgtcgaagagggttacgagtgggccgttgacttggatattgagaagtttttcgatcaggtgaaccatgacattttgatggcccgggtcgcgcgaaaggtgactgataagcgcgttctgactttgatccgcaggtatcttcaggcaggtgtcatggtcaacggcgtggttatcgagaccggggaaggcactcctcagggtggtaggttgagccccttactggcgaatatccttcttgatgaccttgacaaggagcttgaaaaacgggggcacaaattcgtgaggtacgcagacgactgtaatatatatgttaagagcaagcgcgctggggaacgagttatggctagtatcagaaaatttctgcaggaacggttgaagcttaaaattaacgagcagaagtctgccgtcgatcggccctggaagctgaaattcctgggtttctccatgcataaacgtaaaaccggtgaaattctcattcggcttgctccccaggctatagagcgtgttaaaggcaaaatccgggagattacagcacgaaacaagcctgtaagtatggccgagaggatcgaacgactgaatacatacttaggaggatggatcggttattttgcattggccgagacccccagcgtctttgaggagatcgaagggtggatgcgacgacggctccggatgtatttgtggaagcagtggaagcgggtccgtactcgctatcgcgaactcagagctcttggcttatctgaatgggtcgtgcaccagttcgctaacgcccgtaaaggtccctggcggatggcccacgggcctatgaatcgagccttaggcaacgcctattggcaaagccagggtcttatgtcactgaccgagcgataccagagcctgcgacaggctgatatctga

SEQ ID NO: 1528 - DNA, 1929 bp, synthetic construct
  source 1..1929: mol_type = other DNA; note = FH-MCP-MG153-20
atggactacaaagacgatgacgacaagtacccctatgatgtacctgattatgctgccagcaatttcacacagttcgtccttgtagacaacggcggcaccggggatgttacagtggccccgagcaatttcgcaaacggcgtagccgagtggatctcctctaatagcagaagccaggcttataaggttacatgctctgtaaggcagtcttccgcacaaaatagaaagtacacaatcaaggtcgaagtgcccaaggttgctacacagaccgttggtggagaggagttgccagtggctgggtggcgctcctacctgaatatggagttaacaatccccattttcgctaccaattcagactgtgaactcattgtcaaagctatgcaaggtcttcttaaggatggtaacccaattccaagtgcaattgctgctaattcaggcatttattctggcggcagcagcggcggctcaagcggaagtgaaacacctggaacttccgaaagcgctacgcctgaatcttctggtggatcttctggcggatcttccgcatgcgtcgacatgggtgaggtgagggtgaagcccgggggcactcctagagggcgcagcatcgaccggcaggatctgaaactcattctgcggcgggagaagtacagaatggacttaatggaacagatgctttccagagagaatatgttgcaggccctgcgcagggtggaagcaaacaaaggggcagccggtatcgactccgtatcaactaggcagctgagggcacacgtggtccagcactgggaaacaactaaggcgaaactgctggccgggacatataagccctcacccgttaggcgcgttgagatacctaagccagatggcggtgtacgactgttaggaatcccaactgtgatggatagactcatacagcaggctatccttcaggtcctgacaccaatcttcgacccaacattttctcctcattcttatggatttagacccaaacgacggggccacgatgccgttcgccaggcacaggagtatattcgggaggggtaccggtacgttgtggacattgatctggaaaagttcttcgaccgagtcaaccatgatatattgatgtcccgggtcgcccggaaggtgaaagacaagcgagtgcttaagctcattagggcatacctcaaagccggcattatggccgagggaatccgagtcagatctgaagaaggtaccccgcagggtggtcccctgtccccccttctcgccaacatcctcctggatgacctggataaggagctcgaaagaaggcaactgcggttcgtgcgttatgctgacgattgtaatatctatgtcaagacccgcagagctggggagcgcgtgaagcggtccattacaaagtacctggagaaaaaattaaaactcaaggtcaatgaagcgaagagtgccgtggaccgtccttggaagaggaaattcctcgggttctcttttacgtttcataaggaagcgcggatcaggatcgcgcctaagtccctgaaaagggtgaaagacaaaattcggagtctgacaaggggtaatcacctgacctccatggaaaccattatcgaggacttgaatagatacctgatgggttggatggggtattacgcccttatggacaccccatctacattaaaagcccttgatgagtggatccgtcggcggttgaggctggtcctttggtctcgttggaaacgcgtccgaacaaggtatcgcatgttacgggctttggggctgcccgaacgcgatgttcacaagcttgcgaatacacgcaagggcgcgtggagaacttccaaaaccccccagatgcataaagctctcggtatagcgtattggaagagccaagggctcatgtccctcaccgaacgatatttcgaaatcagacagggttggaggacagcagatatctga

SEQ ID NO: 1529 - DNA, 1929 bp, synthetic construct
  source 1..1929: mol_type = other DNA; note = FH-MCP-MG153-20 E43R
atggactacaaagacgatgacgacaagtacccctatgatgtacctgattatgctgccagcaatttcacacagttcgtccttgtagacaacggcggcaccggggatgttacagtggccccgagcaatttcgcaaacggcgtagccgagtggatctcctctaatagcagaagccaggcttataaggttacatgctctgtaaggcagtcttccgcacaaaatagaaagtacacaatcaaggtcgaagtgcccaaggttgctacacagaccgttggtggagaggagttgccagtggctgggtggcgctcctacctgaatatggagttaacaatccccattttcgctaccaattcagactgtgaactcattgtcaaagctatgcaaggtcttcttaaggatggtaacccaattccaagtgcaattgctgctaattcaggcatttattctggcggcagcagcggcggctcaagcggaagtgaaacacctggaacttccgaaagcgctacgcctgaatcttctggtggatcttctggcggatcttccgcatgcgtcgacatgggtgaggtgagggtgaagcccgggggcactcctagagggcgcagcatcgaccggcaggatctgaaactcattctgcggcgggagaagtacagaatggacttaatggaacagatgctttccagaaggaatatgttgcaggccctgcgcagggtggaagcaaacaaaggggcagccggtatcgactccgtatcaactaggcagctgagggcacacgtggtccagcactgggaaacaactaaggcgaaactgctggccgggacatataagccctcacccgttaggcgcgttgagatacctaagccagatggcggtgtacgactgttaggaatcccaactgtgatggatagactcatacagcaggctatccttcaggtcctgacaccaatcttcgacccaacattttctcctcattcttatggatttagacccaaacgacggggccacgatgccgttcgccaggcacaggagtatattcgggaggggtaccggtacgttgtggacattgatctggaaaagttcttcgaccgagtcaaccatgatatattgatgtcccgggtcgcccggaaggtgaaagacaagcgagtgcttaagctcattagggcatacctcaaagccggcattatggccgagggaatccgagtcagatctgaagaaggtaccccgcagggtggtcccctgtccccccttctcgccaacatcctcctggatgacctggataaggagctcgaaagaaggcaactgcggttcgtgcgttatgctgacgattgtaatatctatgtcaagacccgcagagctggggagcgcgtgaagcggtccattacaaagtacctggagaaaaaattaaaactcaaggtcaatgaagcgaagagtgccgtggaccgtccttggaagaggaaattcctcgggttctcttttacgtttcataaggaagcgcggatcaggatcgcgcctaagtccctgaaaagggtgaaagacaaaattcggagtctgacaaggggtaatcacctgacctccatggaaaccattatcgaggacttgaatagatacctgatgggttggatggggtattacgcccttatggacaccccatctacattaaaagcccttgatgagtggatccgtcggcggttgaggctggtcctttggtctcgttggaaacgcgtccgaacaaggtatcgcatgttacgggctttggggctgcccgaacgcgatgttcacaagcttgcgaatacacgcaagggcgcgtggagaacttccaaaaccccccagatgcataaagctctcggtatagcgtattggaagagccaagggctcatgtccctcaccgaacgatatttcgaaatcagacagggttggaggacagcagatatctga

SEQ ID NO: 1530 - DNA, 1929 bp, synthetic construct
  source 1..1929: mol_type = other DNA; note = FH-MCP-MG153-20 N55R
atggactacaaagacgatgacgacaagtacccctatgatgtacctgattatgctgccagcaatttcacacagttcgtccttgtagacaacggcggcaccggggatgttacagtggccccgagcaatttcgcaaacggcgtagccgagtggatctcctctaatagcagaagccaggcttataaggttacatgctctgtaaggcagtcttccgcacaaaatagaaagtacacaatcaaggtcgaagtgcccaaggttgctacacagaccgttggtggagaggagttgccagtggctgggtggcgctcctacctgaatatggagttaacaatccccattttcgctaccaattcagactgtgaactcattgtcaaagctatgcaaggtcttcttaaggatggtaacccaattccaagtgcaattgctgctaattcaggcatttattctggcggcagcagcggcggctcaagcggaagtgaaacacctggaacttccgaaagcgctacgcctgaatcttctggtggatcttctggcggatcttccgcatgcgtcgacatgggtgaggtgagggtgaagcccgggggcactcctagagggcgcagcatcgaccggcaggatctgaaactcattctgcggcgggagaagtacagaatggacttaatggaacagatgctttccagagagaatatgttgcaggccctgcgcagggtggaagcaaggaaaggggcagccggtatcgactccgtatcaactaggcagctgagggcacacgtggtccagcactgggaaacaactaaggcgaaactgctggccgggacatataagccctcacccgttaggcgcgttgagatacctaagccagatggcggtgtacgactgttaggaatcccaactgtgatggatagactcatacagcaggctatccttcaggtcctgacaccaatcttcgacccaacattttctcctcattcttatggatttagacccaaacgacggggccacgatgccgttcgccaggcacaggagtatattcgggaggggtaccggtacgttgtggacattgatctggaaaagttcttcgaccgagtcaaccatgatatattgatgtcccgggtcgcccggaaggtgaaagacaagcgagtgcttaagctcattagggcatacctcaaagccggcattatggccgagggaatccgagtcagatctgaagaaggtaccccgcagggtggtcccctgtccccccttctcgccaacatcctcctggatgacctggataaggagctcgaaagaaggcaactgcggttcgtgcgttatgctgacgattgtaatatctatgtcaagacccgcagagctggggagcgcgtgaagcggtccattacaaagtacctggagaaaaaattaaaactcaaggtcaatgaagcgaagagtgccgtggaccgtccttggaagaggaaattcctcgggttctcttttacgtttcataaggaagcgcggatcaggatcgcgcctaagtccctgaaaagggtgaaagacaaaattcggagtctgacaaggggtaatcacctgacctccatggaaaccattatcgaggacttgaatagatacctgatgggttggatggggtattacgcccttatggacaccccatctacattaaaagcccttgatgagtggatccgtcggcggttgaggctggtcctttggtctcgttggaaacgcgtccgaacaaggtatcgcatgttacgggctttggggctgcccgaacgcgatgttcacaagcttgcgaatacacgcaagggcgcgtggagaacttccaaaaccccccagatgcataaagctctcggtatagcgtattggaagagccaagggctcatgtccctcaccgaacgatatttcgaaatcagacagggttggaggacagcagatatctga

SEQ ID NO: 1531 - DNA, 1929 bp, synthetic construct; identical to SEQ ID NO: 1530
  source 1..1929: mol_type = other DNA; note = FH-MCP-MG153-20 D103R

SEQ ID NO: 1532 - DNA, 1929 bp, synthetic construct
  source 1..1929: mol_type = other DNA; note = FH-MCP-MG153-20 P226R
atggactacaaagacgatgacgacaagtacccctatgatgtacctgattatgctgccagcaatttcacacagttcgtccttgtagacaacggcggcaccggggatgttacagtggccccgagcaatttcgcaaacggcgtagccgagtggatctcctctaatagcagaagccaggcttataaggttacatgctctgtaaggcagtcttccgcacaaaatagaaagtacacaatcaaggtcgaagtgcccaaggttgctacacagaccgttggtggagaggagttgccagtggctgggtggcgctcctacctgaatatggagttaacaatccccattttcgctaccaattcagactgtgaactcattgtcaaagctatgcaaggtcttcttaaggatggtaacccaattccaagtgcaattgctgctaattcaggcatttattctggcggcagcagcggcggctcaagcggaagtgaaacacctggaacttccgaaagcgctacgcctgaatcttctggtggatcttctggcggatcttccgcatgcgtcgacatgggtgaggtgagggtgaagcccgggggcactcctagagggcgcagcatcgaccggcaggatctgaaactcattctgcggcgggagaagtacagaatggacttaatggaacagatgctttccagagagaatatgttgcaggccctgcgcagggtggaagcaaacaaaggggcagccggtatcgactccgtatcaactaggcagctgagggcacacgtggtccagcactgggaaacaactaaggcgaaactgctggccgggacatataagccctcacccgttaggcgcgttgagatacctaagccagatggcggtgtacgactgttaggaatcccaactgtgatggatagactcatacagcaggctatccttcaggtcctgacaccaatcttcgacccaacattttctcctcattcttatggatttagacccaaacgacggggccacgatgccgttcgccaggcacaggagtatattcgggaggggtaccggtacgttgtggacattgatctggaaaagttcttcgaccgagtcaaccatgatatattgatgtcccgggtcgcccggaaggtgaaagacaagcgagtgcttaagctcattagggcatacctcaaagccggcattatggccgagggaatccgagtcagatctgaagaaggtaccccgcagggtggtaggctgtccccccttctcgccaacatcctcctggatgacctggataaggagctcgaaagaaggcaactgcggttcgtgcgttatgctgacgattgtaatatctatgtcaagacccgcagagctggggagcgcgtgaagcggtccattacaaagtacctggagaaaaaattaaaactcaaggtcaatgaagcgaagagtgccgtggaccgtccttggaagaggaaattcctcgggttctcttttacgtttcataaggaagcgcggatcaggatcgcgcctaagtccctgaaaagggtgaaagacaaaattcggagtctgacaaggggtaatcacctgacctccatggaaaccattatcgaggacttgaatagatacctgatgggttggatggggtattacgcccttatggacaccccatctacattaaaagcccttgatgagtggatccgtcggcggttgaggctggtcctttggtctcgttggaaacgcgtccgaacaaggtatcgcatgttacgggctttggggctgcccgaacgcgatgttcacaagcttgcgaatacacgcaagggcgcgtggagaacttccaaaaccccccagatgcataaagctctcggtatagcgtattggaagagccaagggctcatgtccctcaccgaacgatatttcgaaatcagacagggttggaggacagcagatatctga

SEQ ID NO: 1533 - DNA, 1929 bp, synthetic construct
  source 1..1929: mol_type = other DNA; note = FH-MCP-MG153-20 Tetramutant
atggactacaaagacgatgacgacaagtacccctatgatgtacctgattatgctgccagcaatttcacacagttcgtccttgtagacaacggcggcaccggggatgttacagtggccccgagcaatttcgcaaacggcgtagccgagtggatctcctctaatagcagaagccaggcttataaggttacatgctctgtaaggcagtcttccgcacaaaatagaaagtacacaatcaaggtcgaagtgcccaaggttgctacacagaccgttggtggagaggagttgccagtggctgggtggcgctcctacctgaatatggagttaacaatccccattttcgctaccaattcagactgtgaactcattgtcaaagctatgcaaggtcttcttaaggatggtaacccaattccaagtgcaattgctgctaattcaggcatttattctggcggcagcagcggcggctcaagcggaagtgaaacacctggaacttccgaaagcgctacgcctgaatcttctggtggatcttctggcggatcttccgcatgcgtcgacatgggtgaggtgagggtgaagcccgggggcactcctagagggcgcagcatcgaccggcaggatctgaaactcattctgcggcgggagaagtacagaatggacttaatggaacagatgctttccagaaggaatatgttgcaggccctgcgcagggtggaagcaaggaaaggggcagccggtatcgactccgtatcaactaggcagctgagggcacacgtggtccagcactgggaaacaactaaggcgaaactgctggccgggacatataagccctcacccgttaggcgcgttgagatacctaagccaaggggcggtgtacgactgttaggaatcccaactgtgatggatagactcatacagcaggctatccttcaggtcctgacaccaatcttcgacccaacattttctcctcattcttatggatttagacccaaacgacggggccacgatgccgttcgccaggcacaggagtatattcgggaggggtaccggtacgttgtggacattgatctggaaaagttcttcgaccgagtcaaccatgatatattgatgtcccgggtcgcccggaaggtgaaagacaagcgagtgcttaagctcattagggcatacctcaaagccggcattatggccgagggaatccgagtcagatctgaagaaggtaccccgcagggtggtaggctgtccccccttctcgccaacatcctcctggatgacctggataaggagctcgaaagaaggcaactgcggttcgtgcgttatgctgacgattgtaatatctatgtcaagacccgcagagctggggagcgcgtgaagcggtccattacaaagtacctggagaaaaaattaaaactcaaggtcaatgaagcgaagagtgccgtggaccgtccttggaagaggaaattcctcgggttctcttttacgtttcataaggaagcgcggatcaggatcgcgcctaagtccctgaaaagggtgaaagacaaaattcggagtctgacaaggggtaatcacctgacctccatggaaaccattatcgaggacttgaatagatacctgatgggttggatggggtattacgcccttatggacaccccatctacattaaaagcccttgatgagtggatccgtcggcggttgaggctggtcctttggtctcgttggaaacgcgtccgaacaaggtatcgcatgttacgggctttggggctgcccgaacgcgatgttcacaagcttgcgaatacacgcaagggcgcgtggagaacttccaaaaccccccagatgcataaagctctcggtatagcgtattggaagagccaagggctcatgtccctcaccgaacgatatttcgaaatcagacagggttggaggacagcagatatctga

SEQ ID NO: 1534 - DNA, 1842 bp, synthetic construct; identical to SEQ ID NO: 753
  source 1..1842: mol_type = other DNA; note = FH-MCP-MG153-51

SEQ ID NO: 1535 - DNA, 3918 bp, synthetic construct
  source 1..3918: mol_type = other DNA; note = FH-MCP-MG140-3
atggactacaaagacgatgacgacaagtacccctatgatgtacctgattatgctgccagcaatttcacacagttcgtccttgtagacaacggcggcaccggggatgttacagtggccccgagcaatttcgcaaacggcgtagccgagtggatctcctctaatagcagaagccaggcttataaggttacatgctctgtaaggcagtcttccgcacaaaatagaaagtacacaatcaaggtcgaagtgcccaaggttgctacacagaccgttggtggagaggagttgccagtggctgggtggcgctcctacctgaatatggagttaacaatccccattttcgctaccaattcagactgtgaactcattgtcaaagctatgcaaggtcttcttaaggatggtaacccaattccaagtgcaattgctgctaattcaggcatttattctggcggcagcagcggcggctcaagcggaagtgaaacacctggaacttccgaaagcgctacgcctgaatcttctggtggatcttctggcggatcttccgcatgcgtcgactcacattctactgctgccgcttcttccggagccgcaactggccctatagtcataagataccctgtaaacaccactaatggcgggacgaccggagaacaagcctgcttctttgctgagtcaagcaactgcgggctggctttcgtggacaataagtcatttgtggaccatctgttgcgggcccataaggcgacacgagatcaaattcaatatatatgttctcattgtcataggcagtttgagaaaatcgaaagcgttcgatcacatcataacatttgcaagcggaaggaagctgttgccccggacttagatgctaggctgccagtggaatgcgaagtggacgggtgttcacgccgctttacgactacgtccgggatgcggctgcacgtgaagaaagcacatccaattgaatatcacgcatctatacctcaatctaaaagaaatttgtggagcgaaggggagatgcggatgctggctcgtatggagctggacaatccgggactgacaaatgcgaggatgaacgaattgctgcatagtcttcatccttccaggtcagttgatgtcatcagacatatgcgcgggagaaacactcgatatagggaaatcatggaagagctcgtgttgattggcgttccagaggatagtgatagccaagccgaaaagacagcagaaccggagccagaaggaagaatcaatgaatgccagctggaagaactggtaaagacgcattcacaaattgatgacgcgcgataccaagccagtattgaatacgtacgtagggtacttcggtctgacgatccaggtgagttcttcaatgactggcttttcagttgcttccctggcaaggaaggccggcggattcagcgtcgaaaacgtgaacggctgcccccacgcaatgcaaaacagaagcgggccgcagaatttcgggtgctgcaggagctgtggcggaaagatcgttcaagacttgcaaccgtcatccttgataagatgccacctacggctaaagaaccgccgattggcgatatagaaaaggtgtatactaccaggttcgaacggcccagtccagaggaccaacatgagtttacgtccaagcctattgaggagcctatggagatggtacggtttatcacagttgaggaagttcttaagaatttaaaagccatgaagtctaacaacgcccccgggttggactctaacataacaatgaagcgtcttcggtccttgccgttgccctgccttcagctcgtctttaattgttggttggccatcggaaaggctccacagagtatgaaacaatgtcggagcaagctgcttcccaaaggggccgaaggtctggatgatgtaaataattggcgtcctttgaccataggctctctcttgatccggttatatacccggatccttgctatgcgcttacagtctaaagtccagctgcatcccagacaaaaggcctttcaacctttggacggatgcggagaaaatatcgcaatagtgtcatctttgctgcaagatgcgcacgaacgcaagaaagaattaaacatcatatttctggacatcgcgaaggcttttgattgcgtgtcacatcacagcattcaacgggcactgaatagatttggcttgccacgcgcttttcgacgtgtgatcgaagatctgtatgatggtgccacaacagtgtttcaaacatcagagggcgatagcaagacccttgggattagctctggagtaaaacaaggttgtcccttgtcccccgtccttttcaatatggtcatggacgaactcatcgctgacgcaccctctacggagtggggctatgagcttcacgacgaatccgtcgggctcctggcatttgctgacgacattgccctggtgagccattctagggcaatgatgtcacacgcgcttgattatgctgcaggcttcttcgaaaagagaaacttacaactgaacgccaggaagtgtattgggcttagtatcaagaaagctccccgccgaaaggttatgcggatcgaaatggggagtatctggagtctccgcaatgggtctgacaacattcccatcaaaatgctttctcccgccgacatggctcgctatcttggagccctgttttccccgtctgggaagcaaacaattgatctcgccactatgaagggctggattacgtccatagaaaagagcagactcaaaccgcaccaaaagttggtgatgctgcgaacgtaccttcttccgagggtactccatcacctcactattggagaaccaaacgcaactaccttgcgtcgggttgagagggaactgcgcaattcagtgaagcggtttctcaaattgcctgtggccactgccacacccttctttcatattagcacaaaagagggtggactcgagttaccacctttgctcgagaccatagcaaaacgaaaactgaagtgggaaataaggttacagaaatcaaaggattccttgattcgagccgtcgctgactctccaaaattccgtaaacaatttgacaaagctcgggcctggattggagtgccggtgattaatcgaccaagtgacatcaataggcgaatccgagagctgaataacggcaggtttgaaaggttcacgtctgagctggctgtccaatcccggtgtcatagggctctggccagcaatcccttgcgaaatgattggctgaccggacacaaccccgggctttacgcatcacaatttatagacgcattgaaacttgtcactagccaactgcccacccgcgaagcactgaatcggggaaacccccaggccgataaaaggtgtcggggctgtggattctccgtagagaatcaaaagcacgtcatcagtaattgtcccctggtccaacaagagcgtcatctgcgccataatcgtgtcgcccagctgtttgctcgttacgccaaagagaaaggatggaatattatagcagaacctcggatcaggaatcccagcggcgaaatcatgcgtccggacatcgttctgcggcgagatgataacgtagctatcgtagacatccaaatcccttatgaagacggcggtcgcgaacaattggctgaacgatatagacaaaagtgcagcaaatatcggcagttaagcacccacattcagcatgtgctgggagttaccaatcataccattggtgcgattattgttggtgcttgtggcacatggtgcgagcttaacaatcccatcttggattacataggagtcaatactacagccataaagaagaatctcagcattgaagctttgaggggcacactgaaaatattcggccaatttaagaatagggtgtttagaaatgagagagtgcatccatcacagcggccaagctccggcccaccagtaccagatatctaa

SEQ ID NO: 1536 - DNA, 3726 bp, synthetic construct
  source 1..3726: mol_type = other DNA; note = FH-MCP-MG140-8
atggactacaaagacgatgacgacaagtacccctatgatgtacctgattatgctgccagcaatttcacacagttcgtccttgtagacaacggcggcaccggggatgttacagtggccccgagcaatttcgcaaacggcgtagccgagtggatctcctctaatagcagaagccaggcttataaggttacatgctctgtaaggcagtcttccgcacaaaatagaaagtacacaatcaaggtcgaagtgcccaaggttgctacacagaccgttggtggagaggagttgccagtggctgggtggcgctcctacctgaatatggagttaacaatccccattttcgctaccaattcagactgtgaactcattgtcaaagctatgcaaggtcttcttaaggatggtaacccaattccaagtgcaattgctgctaattcaggcatttattctggcggcagcagcggcggctcaagcggaagtgaaacacctggaacttccgaaagcgctacgcctgaatcttctggtggatcttctggcggatcttccgcatgcgtcgactacccaaccagtgccgaagtgcctcaaccctgccccgtatgtctgagctctttgatagatcctaaacagattagagatcactttcggaagaagcatcatggcgtgcttatgcactggacctgccggaagtgcggcaggttttggccaaataacaaaagtgctgcatctcactataggtattgtattaaaagtcttccgagtctcgaggggcctagcaaatcacacaagtgcatcgaatgcggcggatccttttcaaccctggcaggccttcaactccacaggaaacggaagcaccctgaagcctacaatgagtctctcccccggcccactgggaagaatcggccatggggagatgacgagctgaagcggctggcggccgtggagctcgatagcggcggtacaaagcatattaacattaaatgccaaaagcatctccctcataggacaatcgaggcaatcgcatctattcgcaagactgatcgctatcgcattatcttaagggaaatccggtctagccgatctataagccgagagacccgcgaggaagcaactacgtcaacacctgacagcagcaacgtgctggaacggttaacatcccgaatcgcagagctgaagtctggagattacagcccatccgtcgaagccattctcgcttataccgaacgctgcctcgaggatcgcaatgcaagtagtggtctgagcctgctgccttctgagatgtatatgcccaaacccacttccgcttcaaagataaacagaggtatgcgcacgcccttccggcctcaaaatcgaacgcagagaagacgtcaacattatcaacaggtccaattgctgtacaaacgcgatcggaaacaggcagctggcgtgatcttggacggatccccgctgcacgtcgtgcaaccggacgtggagaaggtagatgaaatctttagatcaagattttcccgaccttctccaccggatgacgcagagttcatttccagtcctgccggtgtcttaaatatggattatataactgcaggagagattcaacaatgtagggacagcatgaagaagaataacgcacccggtccagaccgcaacattacaatggacgtcctcttggcactggaactcccagtcctggagctgttgtttaacacgtggttagcccttaaacaggtacctgctgcatttaagacggctaggacaatactgatacccaagagcggcgatacctcagacccgaataattggcggcccattacaatatgtagcctcatctcaagactctacgccaaactgttagcctcaagattgtccaaatgtgccaacttatcagaaagacagaaggcttttcgacctgtcgatggttgcggcgagaatacagccatcctttcagccgttatcgctcaagctcgtaaaaccaagagtcaactgcatgtagtgttcttagatctggcaaaagcttttgatactattccgcatacatctattgtccgggcgctgaaaaggaaagcattgcctggccattttattgacgtggttgagaacttgtataccgaagctacaacaagtatttctgttggtgggaagaatacttccagtatgccgttgacctctggggtcaaacaaggctgtcctctgagccctatccttttcaatctggtattggatgaacttatcacattaataggtgatgacaacggagttgacttgaatgacaagaagatcgccatacttgcctttgccgatgatctcgtcctgttaagccctaccacagacggcatggagaccaacctgaaactgtgtgagggattctttgataaaagatcaatgaagttgaacgccaggaagagtgtgagcctctccattgttagggctcacaaacggaagacaatgctcactgacgaacgtcctaagtggaaagttcatggagagtttcttcctactattaaacatactgaagaaatcaagtacttgggtgtccgttattctgcagcaggaaggagcattgctaagttccctaaactcgatcaatggctccaacggctgaagaaagccccacttaaaccacagcaacgcatacaaatggtcagatctacaattacttccaggctgattcatacgctccgattatcaagagtacacgctaaactcctgaaagacttggacaggaaaatccggtccttcgtcaaatcagtcctgcaccttccatccggaacaagtactgacttcttctacattcccgtgctcaaaggcggtctggggctgcaggaatttatgactctgattccagctgcaaagctgaagctcatcaacagtatgaagaagagctctgaccaagcagttattgccgcaatggaagtcgatcattggcttagagaggagcgctggtgccgtaaggtcactttgaatcaaggaaacaagaatgatgccgaacgcaggcgccttgcaaggtatataaacagcccacgaggcaaaagtcaagtggggttcgccaatttgccaggtcagtgccgttggttagagggcggggcaaaattaacgggccacgaatatattgtgggatgccacttaatgtcaaatacgctgccagttaggactcgcacttttcatggtgggcgcgacagagtggtcacctgcagatattgtccaggggtcctggaaacaccctcacacgcactccagagctgccccgtcgtgcgtaatgccgtaactaagcgccatgacctgatcttaactaaactccaacacttcctcactcctaactatgactcagtgattcgagaaccctggtttaatgggcgggaaggtaggatgaatcccgacttggtcctcaaacagggaaagatggtttatgtggttgatctgacaattccttacgacagttctcccgagttcattgactcacaagcccagcgaaaggtggcaaaatatgataccctcaagcccttgctgcaacagaagttccaagctgaaagagtagaggttataggcctggcattaggagcgcgcggcatgtacaccagcgccggtattcagacatgcttgaaactgggtctctctgatcgtcagcgacgatatatgggaatgatggccttgcgtttaacttgcgctgtgtggggaattttccggtctcaaccttctgggttgttcaacaaagtcccggacactggtactaccgatatctaa

SEQ ID NO: 1537 - DNA, 1818 bp, synthetic construct
  source 1..1818: mol_type = other DNA; note = FH-MCP-TGIRT Dead
atggactacaaagacgatgacgacaagtacccctatgatgtacctgattatgctgccagcaatttcacacagttcgtccttgtagacaacggcggcaccggggatgttacagtggccccgagcaatttcgcaaacggcgtagccgagtggatctcctctaatagcagaagccaggcttataaggttacatgctctgtaaggcagtcttccgcacaaaatagaaagtacacaatcaaggtcgaagtgcccaaggttgctacacagaccgttggtggagaggagttgccagtggctgggtggcgctcctacctgaatatggagttaacaatccccattttcgctaccaattcagactgtgaactcattgtcaaagctatgcaaggtcttcttaaggatggtaacccaattccaagtgcaattgctgctaattcaggcatttattctggcggcagcagcggcggctcaagcggaagtgaaacacctggaacttccgaaagcgctacgcctgaatcttctggtggatcttctggcggatcttccgcatgcgtcgacgctctgttggaacgcatcctggctcgtgataatttgattactgccctcaagcgtgtggaagctaaccagggtgcacccggaatcgatggtgtatcaacggaccaactgcgcgactatattcgagctcactggtcaaccattcatgcacaattattagccggtacatacagacctgctcctgtgagaagggtggaaattccgaagcctggcggcggcactaggcaactgggcatccccacggttgtcgataggctgatacaacaggccatccttcaggaactcacaccgattttcgatccagatttctcatcaagttctttcgggttccgcccaggacggaacgcacacgatgctgtgcggcaagcccaaggttatatacaagagggctaccgttatgttgtggacatggaccttgagaagttctttgacagagttaatcacgatatactcatgtcacgggtcgccaggaaagttaaagataaaagggtacttaagttaataagagcatacctgcaagccggcgtgatgattgaaggggtgaaggtgcaaaccgaagagggtaccccacagggtggtcccttatcccctctcttagccaatatattgctggatgatcttgacaaggagcttgagaagcgaggcttgaaattttgtcgatacgcctacgattgtaatatctatgtaaaatccctgcgcgcagggcagagagttaaacagtccatccaaagattcctggagaagactttgaaacttaaagtaaacgaagaaaagagtgccgtagaccgcccgtggaagcgtgcttttcttggtttcagcttcacccccgagcgtaaagcccgcattcggttggctcctagatctatacaacggttgaaacaacgaatccgacaattgacaaatcctaattggtccatttctatgcctgagcgtattcatcgcgtcaatcaatatgtgatgggttggattggatattttagacttgtggaaacacccagtgtcttacaaacaatagagggatggatacggcgaagactgagattatgccagtggctgcaatggaagagggtacggacccgaatcagagaattacgcgctctgggactgaaggaaactgcggtaatggagatcgccaacaccaggaaaggtgcgtggagaaccacgaagacaccccaacttcatcaagccttgggcaagacttactggaccgcacaagggctcaaaagcttgactcaacggtactttgaactgagacaaggggatatctga

SEQ ID NO: 1538 - DNA, 4728 bp, synthetic construct
  source 1..4728: mol_type = other DNA; note = FH-MCP-R2Tg Dead
atggactacaaagacgatgacgacaagtacccctatgatgtacctgattatgctgccagcaatttcacacagttcgtccttgtagacaacggcggcaccggggatgttacagtggccccgagcaatttcgcaaacggcgtagccgagtggatctcctctaatagcagaagccaggcttataaggttacatgctctgtaaggcagtcttccgcacaaaatagaaagtacacaatcaaggtcgaagtgcccaaggttgctacacagaccgttggtggagaggagttgccagtggctgggtggcgctcctacctgaatatggagttaacaatccccattttcgctaccaattcagactgtgaactcattgtcaaagctatgcaaggtcttcttaaggatggtaacccaattccaagtgcaattgctgctaattcaggcatttattctggcggcagcagcggcggctcaagcggaagtgaaacacctggaacttccgaaagcgctacgcctgaatcttctggtggatcttctggcggatcttccgcatgcgtcgacgcatcatgtcccaaacctggcccacctgtttcagccggtgcaatgagtcttgaatccgggttgacaactcatagcgtccttgcaatagaacggggccctaattcattagccaactccgggtctgacttcggcggtggcggccttgggctccctttgcggcttttgcgtgtgtccgtagggacacaaaccagtcggagtgattgggtggacctcgtcagctggtcccaccccggacccacatctaaaagtcaacaagtagacctggtatccttgtttcctaaacatagagtcgatctcctctcaaagaacgaccaagtggacttggtggcacaatttcttcccagcaaatttccccctaacttagcagagaacgatttagcgcttctcgttaatttggaattttataggagcgacttgcacgtctatgaatgcgtgcattttgccgcccattgggaaggcctgtcaggattgcccgaggtctatgaacaactggccccacaaccctgcgtaggagaaactctccactccagcctgccccgcgacagtgaacttttcgtgccggaagaaggctcttctgaaaaggaaagtgaagacgcccccaagacgtctccaccgacacccgggaagcatgggctggagcaaactggagaagagaaagtgatggtaaccgtacctgataagaatcccccgtgcccttgctgcggaaccagggtgaatagcgttctcaacctgatagagcatcttaaagtatcacatggaaaacgtggagtgtgcttccgttgtgctaaatgtggtaaggaaaattcaaattaccacagcgtcgtgtgccattttcctaagtgtaggggcccagagacagagaaagctcctgccggggaatggatctgtgaagtctgcaacagggactttaccactaaaatagggctgggccaacacaagcggttggctcacccagcagtcagaaatcaggaaagaatcgtggcgagtcaacctaaagaaaccagcaatcggggcgcacataagcggtgttggaccaaggaagaagaagaacttctcattcgactcgaggcacaatttgaaggcaacaagaatataaacaaactgatcgccgaacacataacaaccaagacagctaaacaaatttcagacaagcgccgacttttatccagaaaacccgcagaggaaccacgagaagaaccagggacatgccatcatacccgccgcgctgccgcaagcttacggactgagccggaaatgtctcatcatgctcaagctgaagaccgcgacaatggccctggccggcgtcctctgcctggtagggcagcagcaggtggacgtacaatggatgaaatcaggagacatcccgataaagggaatggccagcaaaggccgaccaaacagaagagcgaggagcaacttcaagcctactataagaaaacattagaagaacgtctctccgctggcgccctcaatacatttcctagagcttttaaacaagttatggaaggcagagatattaagctggtcattaatcaaaccgcccaggattgttttggctgcctcgaaagcatttcccaaataagaaccgctacccgagacaagaaagacaccgtcacccgagagaagcacccaaagaagcctttccagaaatggatgaaggatagagcgataaagaaaggcaactatctgcgttttcaaagactgttctatttagatcgcggaaagctggcaaagattattctcgacgacatcgaatgccttagctgcgacattccactctctgagatatatagcgtctttaaaacaagatgggaaaccacgggcagctttaagtccctcggggattttaaaacatatggaaaagctgataacaccgcgtttcgagagctgataacggccaaggagattgaaaagaacgtgcaagaaatgtccaagggttccgccccagggccagacggcataactctgggcgacgttgtgaaaatggacccggagttcagtaggacaatggagatctttaacttgtggcttacaactggaaagatacccgatatggtaagaggatgcaggaccgtgctgattcccaagtcaagtaaacccgatcgattaaaggacatcaataactggcgacctattacaattggcagcatactgctgcggctctttagtcgaatcgttactgccagactcagcaaagcgtgtcctctcaacccccgtcaaagaggttttatccgcgctgctggctgcagcgaaaatcttaaactccttcaaacaattatttggtccgccaaacgcgagcatcgcccccttggtgtggtatttgtggatattgcaaaggccttcgacaccgtgtctcaccaacatatcatacacgctctccaacaaagagaagtggacccacatattgtcgggctggtcagcaatatgtatgaaaatattagcacatatattactacaaaacgtaacacacatactgacaaaatccaaatccgcgtgggcgtgaaacagggagatccgatgtcccctctgctgttcaacttagccatggaccctctgctgtgcaagcttgaagaatcaggaaaaggctaccaccgcgggcaatcaagcattactgcgatggcatttgcatacgatctggtccttctcagtgatagctgggaaaatatgaataccaatatttctatcctggaaacattttgcaatctgactgggctcaagacccaaggacagaagtgtcacggattttatataaagccaacaaaggactcatatactatcaatgattgtgctgcgtggaccattaatgggactcctcttaatatgatagatcctggcgagagcgagaaatacctgggcttgcaatttgatccctggataggtatagcccgctctggactctccaccaagctcgacttttggttgcaacggatcgaccaggctccactgaagcctctccagaaaacggacattctgaaaacttataccattcctcgacttatttacatcgcggatcactctgaagtgaaaacagcattgctggagaccttagaccagaagattcgcacagccgtcaaggagtggcttcacctgccgccttgtacttgcgatgccatcctttattcctctacgcgagatggcgggctggggataacgaagctcgctgggttaatccccagtgtgcaagccagacgactccaccgtatcgcccaatccagtgatgatactatgaaatgttttatggaaaaggagaaaatggaacaattgcacaagaagctttggattcaagcaggcggcgatcgagagaatatcccctctatatgggaagccccacccagctctgagccaccaaataatgtgtccactaatagcgaatgggaagcacccacccaaaaggataaattccctaagccctgtaattggcggaagaatgagtttaagaaatggactaagctggcaagtcaaggacgaggaatagtaaatttcgagagggataagatcagtaaccattggattcagtactataggcggattccgcatagaaaacttcttacggcccttcagctccgcgccaacgtctaccctacccgtgaatttcttgctcgaggaaggcaagatcaatatattaaagcctgcagacattgcgatgccgatatagaaagttgtgctcacataatcgggaattgtcctgtcacgcaggatgcgcgcatcaagagacataattacatctgcgagcttctgctcgaggaagcaaagaagaaggattgggtcgtattcaaagagccacacataagagattcaaataaagagctttacaaacctgacttaattttcgtaaaagatgcacgagcattggtagtagacgtgactgtcagatacgaggctgccaaaagctccttggaagaggccgcggctgagaaggtgcgaaaatacaagcaccttgaaacagaagtcagacacctgactaatgcaaaagatgtgaccttcgtcggatttcccctgggagcccggggaaaatggcaccaagacaactttaaattgcttactgaacttgggctttccaagagtcgccaagtgaaaatggcagaaacattctctaccgtcgccctcttttccagcgtggacatcgttcatatgtttgcatctagggcaaggaaatccatggtcatggatatctga

SEQ ID NO: 1539 - DNA, 1968 bp, synthetic construct
  source 1..1968: mol_type = other DNA; note = FH-MCP-MG153-18 Dead
atggactacaaagacgatgacgacaagtacccctatgatgtacctgattatgctgccagcaatttcacacagttcgtccttgtagacaacggcggcaccggggatgttacagtggccccgagcaatttcgcaaacggcgtagccgagtggatctcctctaatagcagaagccaggcttataaggttacatgctctgtaaggcagtcttccgcacaaaatagaaagtacacaatcaaggtcgaagtgcccaaggttgctacacagaccgttggtggagaggagttgccagtggctgggtggcgctcctacctgaatatggagttaacaatccccattttcgctaccaattcagactgtgaactcattgtcaaagctatgcaaggtcttcttaaggatggtaacccaattccaagtgcaattgctgctaattcaggcatttattctggcggcagcagcggcggctcaagcggaagtgaaacacctggaacttccgaaagcgctacgcctgaatcttctggtggatcttctggcggatcttccgcatgcgtcgacatgaggtcacaagagggaagacggcagcagaaagctcctgagggcgcgtacttgtgggaagagatggtgaagccatggggtactactggaggaccaagcccgtcttccgctcagggaggcgcgacccctcgcggggggcagggcagtggtttgatggagcaggtggttgagaggagcaacatgctggctgcgctgcgtcgggttgaaagaaatggaggcgcaccgggagtggacggcatacccaccgagaggctccgcgatcagattcgagccgagtggccaagaatcagggaagaacttcttgccggcacttaccgccctaaaccagttcgccgagtggaaatcccgaagcctggaggaggcaagagactgctgggtatccccacagcggtagaccgccttatccaacaagctctcctccaggtgctgactcctatctttgatcctcaatttagcgaagcctcttatggcttccgacccggcagacgggcccatgacgccgtgaggaaggccagacaatatgtcgaagagggttacgagtgggccgttgacttggatattgagaagtttttcgatcaggtgaaccatgacattttgatggcccgggtcgcgcgaaaggtgactgataagcgcgttctgactttgatccgcaggtatcttcaggcaggtgtcatggtcaacggcgtggttatcgagaccggggaaggcactcctcagggtggtcccttgagccccttactggcgaatatccttcttgatgaccttgacaaggagcttgaaaaacgggggcacaaattcgtgaggtacgcatacgactgtaatatatatgttaagagcaagcgcgctggggaacgagttatggctagtatcagaaaatttctgcaggaacggttgaagcttaaaattaacgagcagaagtctgccgtcgatcggccctggaagctgaaattcctgggtttctccatgcataaacgtaaaaccggtgaaattctcattcggcttgctccccaggctatagagcgtgttaaaggcaaaatccgggagattacagcacgaaacaagcctgtaagtatggccgagaggatcgaacgactgaatacatacttaggaggatggatcggttattttgcattggccgagacccccagcgtctttgaggagatcgaagggtggatgcgacgacggctccggatgtatttgtggaagcagtggaagcgggtccgtactcgctatcgcgaactcagagctcttggcttatctgaatgggtcgtgcaccagttcgctaacgcccgtaaaggtccctggcggatggcccacgggcctatgaatcgagccttaggcaacgcctattggcaaagccagggtcttatgtcactgaccgagcgataccagagcctgcgacaggctgatatctga

SEQ ID NO: 1540 - DNA, 1929 bp, synthetic construct
  source 1..1929: mol_type = other DNA; note = FH-MCP-MG153-20 Dead
atggactacaaagacgatgacgacaagtacccctatgatgtacctgattatgctgccagcaatttcacacagttcgtccttgtagacaacggcggcaccggggatgttacagtggccccgagcaatttcgcaaacggcgtagccgagtggatctcctctaatagcagaagccaggcttataaggttacatgctctgtaaggcagtcttccgcacaaaatagaaagtacacaatcaaggtcgaagtgcccaaggttgctacacagaccgttggtggagaggagttgccagtggctgggtggcgctcctacctgaatatggagttaacaatccccattttcgctaccaattcagactgtgaactcattgtcaaagctatgcaaggtcttcttaaggatggtaacccaattccaagtgcaattgctgctaattcaggcatttattctggcggcagcagcggcggctcaagcggaagtgaaacacctggaacttccgaaagcgctacgcctgaatcttctggtggatcttctggcggatcttccgcatgcgtcgacatgggtgaggtgagggtgaagcccgggggcactcctagagggcgcagcatcgaccggcaggatctgaaactcattctgcggcgggagaagtacagaatggacttaatggaacagatgctttccagagagaatatgttgcaggccctgcgcagggtggaagcaaacaaaggggcagccggtatcgactccgtatcaactaggcagctgagggcacacgtggtccagcactgggaaacaactaaggcgaaactgctggccgggacatataagccctcacccgttaggcgcgttgagatacctaagccagatggcggtgtacgactgttaggaatcccaactgtgatggatagactcatacagcaggctatccttcaggtcctgacaccaatcttcgacccaacattttctcctcattcttatggatttagacccaaacgacggggccacgatgccgttcgccaggcacaggagtatattcgggaggggtaccggtacgttgtggacattgatctggaaaagttcttcgaccgagtcaaccatgatatattgatgtcccgggtcgcccggaaggtgaaagacaagcgagtgcttaagctcattagggcatacctcaaagccggcattatggccgagggaatccgagtcagatctgaagaaggtaccccgcagggtggtcccctgtccccccttctcgccaacatcctcctggatgacctggataaggagctcgaaagaaggcaactgcggttcgtgcgttatgcttacgattgtaatatctatgtcaagacccgcagagctggggagcgcgtgaagcggtccattacaaagtacctggagaaaaaattaaaactcaaggtcaatgaagcgaagagtgccgtggaccgtccttggaagaggaaattcctcgggttctcttttacgtttcataaggaagcgcggatcaggatcgcgcctaagtccctgaaaagggtgaaagacaaaattcggagtctgacaaggggtaatcacctgacctccatggaaaccattatcgaggacttgaatagatacctgatgggttggatggggtattacgcccttatggacaccccatctacattaaaagcccttgatgagtggatccgtcggcggttgaggctggtcctttggtctcgttggaaacgcgtccgaacaaggtatcgcatgttacgggctttggggctgcccgaacgcgatgttcacaagcttgcgaatacacgcaagggcgcgtggagaacttccaaaaccccccagatgcataaagctctcggtatagcgtattggaagagccaagggctcatgtccctcaccgaacgatatttcgaaatcagacagggttggaggacagcagatatctga

SEQ ID NO: 1541 - DNA, 1842 bp, synthetic construct
  source 1..1842: mol_type = other DNA; note = FH-MCP-MG153-51 Dead
atggactacaaagacgatgacgacaagtacccctatgatgtacctgattatgctgccagcaatttcacacagttcgtccttgtagacaacggcggcaccggggatgttacagtggccccgagcaatttcgcaaacggcgtagccgagtggatctcctctaatagcagaagccaggcttataaggttacatgctctgtaaggcagtcttccgcacaaaatagaaagtacacaatcaaggtcgaagtgcccaaggttgctacacagaccgttggtggagaggagttgccagtggctgggtggcgctcctacctgaatatggagttaacaatccccattttcgctaccaattcagactgtgaactcattgtcaaagctatgcaaggtcttcttaaggatggtaacccaattccaagtgcaattgctgctaattcaggcatttattctggcggcagcagcggcggctcaagcggaagtgaaacacctggaacttccgaaagcgctacgcctgaatcttctggtggatcttctggcggatcttccgcatgcgtcgacggcgacacaatgactaagcggaaacaccattcactgtacggccagattctccagagactggacactgctttcgcaaaggtgaaggcaaacagaggagccgcaggaatcgatggcgaaagtatcgccgaatttgagcaggatctcgaagccaatttggcacaacttaagagagacctcaaggagaagacatatgctcctcagccagtgcggcgagtctatattcctaaggcttccggtggtcagagaccactcggcattcctacagtcagagaccgggttgtgcagcaggccctgagactggtgctcgagcccgtgttcgaaccgctcttttgcgatagcagctatgggttcaggcctgggcgcagtgcccatcaagctctggatagggtcagcggccatttgagagagggttacaagtgggttgtggattgcgatctgaaatcttattttgatactatcccgcaggaggcccttattgaccgggtcgccgaggaagtcgccgatggcactgttctgaaactcatcagatcttttctgcaagctggagtaatgtctgaagggcagttgcagagaaccatagctggcacgccccagggtggtgtgatctcaccattgctcgccaacatctaccttcacggctttgatcagctcatggaggacagaggactgcgacttacaaggtacgcttacgacttcgtgatcctttgtcgaacccagagagcagcagaacgcgtgatgggtaatgtgcagtcttatcttgaaggccaactggggcttaccgtcaatcgcgagaagagcaaggtggtgcatttgtccgaagggttcgtattccttggatacgagtttgggacgtggggacgaaggcccggaccaaaggctattctgaggtttaaacagcggattagagagctgactcgccggaatcagaccatacctgtagacaaaatggtacgcgagcagctgaacccttaccttcaagggtgggctgggtactttgggtatggccaagtgaggcagcgcttcctggactacgataaatggattcggaggaggctgaggatggtccaattgcggtcctggcgacacatgaaaggcctgcacagggcaatgcgacagaaaggatggaaaggtcccctgcccgccgtctatgttaatatgagacggtggaggtcaagtgttcacagccttgttaactatgccctgggacccgattggatacgcggcttgggacttgtgtcccttgttgacttccaccggccaaccatggtgaccgtaacacgcgatatctga

SEQ ID NO: 1542 - DNA, 3918 bp, synthetic construct
  source 1..3918: mol_type = other DNA; note = FH-MCP-MG140-3 Dead
atggactacaaagacgatgacgacaagtacccctatgatgtacctgattatgctgccagcaatttcacacagttcgtccttgtagacaacggcggcaccggggatgttacagtggccccgagcaatttcgcaaacggcgtagccgagtggatctcctctaatagcagaagccaggcttataaggttacatgctctgtaaggcagtcttccgcacaaaatagaaagtacacaatcaaggtcgaagtgcccaaggttgctacacagaccgttggtggagaggagttgccagtggctgggtggcgctcctacctgaatatggagttaacaatccccattttcgctaccaattcagactgtgaactcattgtcaaagctatgcaaggtcttcttaaggatggtaacccaattccaagtgcaattgctgctaattcaggcatttattctggcggcagcagcggcggctcaagcggaagtgaaacacctggaacttccgaaagcgctacgcctgaatcttctggtggatcttctggcggatcttccgcatgcgtcgactcacattctactgctgccgcttcttccggagccgcaactggccctatagtcataagataccctgtaaacaccactaatggcgggacgaccggagaacaagcctgcttctttgctgagtcaagcaactgcgggctggctttcgtggacaataagtcatttgtggaccatctgttgcgggcccataaggcgacacgagatcaaattcaatatatatgttctcattgtcataggcagtttgagaaaatcgaaagcgttcgatcacatcataacatttgcaagcggaaggaagctgttgccccggacttagatgctaggctgccagtggaatgcgaagtggacgggtgttcacgccgctttacgactacgtccgggatgcggctgcacgtgaagaaagcacatccaattgaatatcacgcatctatacctcaatctaaaagaaatttgtggagcgaaggggagatgcggatgctggctcgtatggagctggacaatccgggactgacaaatgcgaggatgaacgaattgctgcatagtcttcatccttccaggtcagttgatgtcatcagacatatgcgcgggagaaacactcgatatagggaaatcatggaagagctcgtgttgattggcgttccagaggatagtgatagccaagccgaaaagacagcagaaccggagccagaaggaagaatcaatgaatgccagctggaagaactggtaaagacgcattcacaaattgatgacgcgcgataccaagccagtattgaatacgtacgtagggtacttcggtctgacgatccaggtgagttcttcaatgactggcttttcagttgcttccctggcaaggaaggccggcggattcagcgtcgaaaacgtgaacggctgcccccacgcaatgcaaaacagaagcgggccgcagaatttcgggtgctgcaggagctgtggcggaaagatcgttcaagacttgcaaccgtcatccttgataagatgccacctacggctaaagaaccgccgattggcgatatagaaaaggtgtatactaccaggttcgaacggcccagtccagaggaccaacatgagtttacgtccaagcctattgaggagcctatggagatggtacggtttatcacagttgaggaagttcttaagaatttaaaagccatgaagtctaacaacgcccccgggttggactctaacataacaatgaagcgtcttcggtccttgccgttgccctgccttcagctcgtctttaattgttggttggccatcggaaaggctccacagagtatgaaacaatgtcggagcaagctgcttcccaaaggggccgaaggtctggatgatgtaaataattggcgtcctttgaccataggctctctcttgatccggttatatacccggatccttgctatgcgcttacagtctaaagtccagctgcatcccagacaaaaggcctttcaacctttggacggatgcggagaaaatatcgcaatagtgtcatctttgctgcaagatgcgcacgaacgcaagaaagaattaaacatcatatttctggacatcgcgaaggcttttgattgcgtgtcacatcacagcattcaacgggcactgaatagatttggcttgccacgcgcttttcgacgtgtgatcgaagatctgtatgatggtgccacaacagtgtttcaaacatcagagggcgatagcaagacccttgggattagctctggagtaaaacaaggttgtcccttgtcccccgtccttttcaatatggtcatggacgaactcatcgctgacgcaccctctacggagtggggctatgagcttcacgacgaatccgtcgggctcctggcatttgcttacgacattgccctggtgagccattctagggcaatgatgtcacacgcgcttgattatgctgcaggcttcttcgaaaagagaaacttacaactgaacgccaggaagtgtattgggcttagtatcaagaaagctccccgccgaaaggttatgcggatcgaaatggggagtatctggagtctccgcaatgggtctgacaacattcccatcaaaatgctttctcccgccgacatggctcgctatcttggagccctgttttccccgtctgggaagcaaacaattgatctcgccactatgaagggctggattacgtccatagaaaagagcagactcaaaccgcaccaaaagttggtgatgctgcgaacgtaccttcttccgagggtactccatcacctcactattggagaaccaaacgcaactaccttgcgtcgggttgagagggaactgcgcaattcagtgaagcggtttctcaaattgcctgtggccactgccacacccttctttcatattagcacaaaagagggtggactcgagttaccacctttgctcgagaccatagcaaaacgaaaactgaagtgggaaataaggttacagaaatcaaaggattccttgattcgagccgtcgctgactctccaaaattccgtaaacaatttgacaaagctcgggcctggattggagtgccggtgattaatcgaccaagtgacatcaataggcgaatccgagagctgaataacggcaggtttgaaaggttcacgtctgagctggctgtccaatcccggtgtcatagggctctggccagcaatcccttgcgaaatgattggctgaccggacacaaccccgggctttacgcatcacaatttatagacgcattgaaacttgtcactagccaactgcccacccgcgaagcactgaatcggggaaacccccaggccgataaaaggtgtcggggctgtggattctccgtagagaatcaaaagcacgtcatcagtaattgtcccctggtccaacaagagcgtcatctgcgccataatcgtgtcgcccagctgtttgctcgttacgccaaagagaaaggatggaatattatagcagaacctcggatcaggaatcccagcggcgaaatcatgcgtccggacatcgttctgcggcgagatgataacgtagctatcgtagacatccaaatcccttatgaagacggcggtcgcgaacaattggctgaacgatatagacaaaagtgcagcaaatatcggcagttaagcacccacattcagcatgtgctgggagttaccaatcataccattggtgcgattattgttggtgcttgtggcacatggtgcgagcttaacaatcccatcttggattacataggagtcaatactacagccataaagaagaatctcagcattgaagctttgaggggcacactgaaaatattcggccaatttaagaatagggtgtttagaaatgagagagtgcatccatcacagcggccaagctccggcccaccagtaccagatatctaa

SEQ ID NO: 1543 - DNA, 3726 bp, synthetic construct
  source 1..3726: mol_type = other DNA; note = FH-MCP-MG140-8 Dead
atggactacaaagacgatgacgacaagtacccctatgatgtacctgattatgctgccagcaatttcacacagttcgtccttgtagacaacggcggcaccggggatgttacagtggccccgagcaatttcgcaaacggcgtagccgagtggatctcctctaatagcagaagccaggcttataaggttacatgctctgtaaggcagtcttccgcacaaaatagaaagtacacaatcaaggtcgaagtgcccaaggttgctacacagaccgttggtggagaggagttgccagtggctgggtggcgctcctacctgaatatggagttaacaatccccattttcgctaccaattcagactgtgaactcattgtcaaagctatgcaaggtcttcttaaggatggtaacccaattccaagtgcaattgctgctaattcaggcatttattctggcggcagcagcggcggctcaagcggaagtgaaacacctggaacttccgaaagcgctacgcctgaatcttctggtggatcttctggcggatcttccgcatgcgtcgactacccaaccagtgccgaagtgcctcaaccctgccccgtatgtctgagctctttgatagatcctaaacagattagagatcactttcggaagaagcatcatggcgtgcttatgcactggacctgccggaagtgcggcaggttttggccaaataacaaaagtgctgcatctcactataggtattgtattaaaagtcttccgagtctcgaggggcctagcaaatcacacaagtgcatcgaatgcggcggatccttttcaaccctggcaggccttcaactccacaggaaacggaagcaccctgaagcctacaatgagtctctcccccggcccactgggaagaatcggccatggggagatgacgagctgaagcggctggcggccgtggagctcgatagcggcggtacaaagcatattaacattaaatgccaaaagcatctccctcataggacaatcgaggcaatcgcatctattcgcaagactgatcgctatcgcattatcttaagggaaatccggtctagccgatctataagccgagagacccgcgaggaagcaactacgtcaacacctgacagcagcaacgtgctggaacggttaacatcccgaatcgcagagctgaagtctggagattacagcccatccgtcgaagccattctcgcttataccgaacgctgcctcgaggatcgcaatgcaagtagtggtctgagcctgctgccttctgagatgtatatgcccaaacccacttccgcttcaaagataaacagaggtatgcgcacgcccttccggcctcaaaatcgaacgcagagaagacgtcaacattatcaacaggtccaattgctgtacaaacgcgatcggaaacaggcagctggcgtgatcttggacggatccccgctgcacgtcgtgcaaccggacgtggagaaggtagatgaaatctttagatcaagattttcccgaccttctccaccggatgacgcagagttcatttccagtcctgccggtgtcttaaatatggattatataactgcaggagagattcaacaatgtagggacagcatgaagaagaataacgcacccggtccagaccgcaacattacaatggacgtcctcttggcactggaactcccagtcctggagctgttgtttaacacgtggttagcccttaaacaggtacctgctgcatttaagacggctaggacaatactgatacccaagagcggcgatacctcagacccgaataattggcggcccattacaatatgtagcctcatctcaagactctacgccaaactgttagcctcaagattgtccaaatgtgccaacttatcagaaagacagaaggcttttcgacctgtcgatggttgcggcgagaatacagccatcctttcagccgttatcgctcaagctcgtaaaaccaagagtcaactgcatgtagtgttcttagatctggcaaaagcttttgatactattccgcatacatctattgtccgggcgctgaaaaggaaagcattgcctggccattttattgacgtggttgagaacttgtataccgaagctacaacaagtatttctgttggtgggaagaatacttccagtatgccgttgacctctggggtcaaacaaggctgtcctctgagccctatccttttcaatctggtattggatgaacttatcacattaataggtgatgacaacggagttgacttgaatgacaagaagatcgccatacttgcctttgcctacgatctcgtcctgttaagccctaccacagacggcatggagaccaacctgaaactgtgtgagggattctttgataaaagatcaatgaagttgaacgccaggaagagtgtgagcctctccattgttagggctcacaaacggaagacaatgctcactgacgaacgtcctaagtggaaagttcatggagagtttcttcctactattaaacatactgaagaaatcaagtacttgggtgtccgttattctgcagcaggaaggagcattgctaagttccctaaactcgatcaatggctccaacggctgaagaaagccccacttaaaccacagcaacgcatacaaatggtcagatctacaattacttccaggctgattcatacgctccgattatcaagagtacacgctaaactcctgaaagacttggacaggaaaatccggtccttcgtcaaatcagtcctgcaccttccatccggaacaagtactgacttcttctacattcccgtgctcaaaggcggtctggggctgcaggaatttatgactctgattccagctgcaaagctgaagctcatcaacagtatgaagaagagctctgaccaagcagttattgccgcaatggaagtcgatcattggcttagagaggagcgctggtgccgtaaggtcactttgaatcaaggaaacaagaatgatgccgaacgcaggcgccttgcaaggtatataaacagcccacgaggcaaaagtcaagtggggttcgccaatttgccaggtcagtgccgttggttagagggcggggcaaaattaacgggccacgaatatattgtgggatgccacttaatgtcaaatacgctgccagttaggactcgcacttttcatggtgggcgcgacagagtggtcacctgcagatattgtccaggggtcctggaaacaccctcacacgcactccagagctgccccgtcgtgcgtaatgccgtaactaagcgccatgacctgatcttaactaaactccaacacttcctcactcctaactatgactcagtgattcgagaaccctggtttaatgggcgggaaggtaggatgaatcccgacttggtcctcaaacagggaaagatggtttatgtggttgatctgacaattccttacgacagttctcccgagttcattgactcacaagcccagcgaaaggtggcaaaatatgataccctcaagcccttgctgcaacagaagttccaagctgaaagagtagaggttataggcctggcattaggagcgcgcggcatgtacaccagcgccggtattcagacatgcttgaaactgggtctctctgatcgtcagcgacgatatatgggaatgatggccttgcgtttaacttgcgctgtgtggggaattttccggtctcaaccttctgggttgttcaacaaagtcccggacactggtactaccgatatctaa

SEQ ID NO: 1544 - protein, 308 aa, unidentified; identical to SEQ ID NO: 614
  source 1..308: note = uncultivated organism;MG155-4

SEQ ID NO: 1545 - protein, 313 aa, unidentified; identical to SEQ ID NO: 615
  source 1..313: note = uncultivated organism;MG155-5

SEQ ID NO: 1546 - protein, 331 aa, unidentified
  source 1..331: note = uncultivated organism;MG173-3
MGKYKYIDRLRQAMEGKYSEEYINYCAEYAAKLLDKNLPVIYDARHVDEILRLHGIKPDCYHIFVIAGKNKERKITAPSREIKQRQQWILEEILGKQDVSDNCHGFVKKRSILTNAKMHMGHKNILNLDIRNFFPSITETMVIFQFQQMGYSKSAAEALAGVCCYEGKLPQGAPTSPYMSNLILKNMDQDLENFCQKKGITYTRYADDMSFSSNEEIEGFFKDIKFIIGKYSFEINEKKTCYYQDPYRKIVTGLVVKENKVCIPKKFKRKFRQEIYYCRHLGVQRHLENTGNQERAGFREYMYGKAYFIAMVEPEAGKKYLEALDEIEWGY

SEQ ID NO: 1547 - protein, 323 aa, unidentified
  source 1..323: note = uncultivated organism;MG173-4
MKERAFAEEEISACCNYASVLLSKNLPVLFDAQHINIVLQLHKINSAAYHTFTIPQAEKFRTITAPSKPLKQRQKWILQEILSKVDVSEYAHGFEPGRSIKTNALLHANHAYAVCMDIKDFFPSVHYDSICNVFLSIGYSSSAAHLLADICSYNGALPQGAPTSPKLANIIFSPLDEKLAAIAKEERAVYSRYADDLTFSGDHDLKIIYARVKNLLERYEFRLNEEKTHSYGPGVPKRITGLVVQNGTVRVPKYFKRSLRQEIHYCLKYGVLTHLENVKSTHCINYREYLYGKAYFIHMVEPQEGNRYLEKLDQIDWPSSFLV

SEQ ID NO: 1548 - protein, 335 aa, unidentified
  source 1..335: note = uncultivated organism;MG173-5
MEHIEKAYQAGVITEEEKRLIEEYNQRLTDNNVPVIYNLRHLRQLLGIHKSAQDRLFGDKKCDSYRVFHIPKKNGGLREIEAPNEELKRIRLWIKENILDKFSVSQFAKGFVKGVSIYDNAVQHTGKELVVNIDLKDFFPSIQYREIYKIFKYIGYTDSVSKLLTNLCTNARSVLPQGSPASPTISNLVSLKLDKRLGRLADKIGASYTRYADDITFSGKKTIQKYIELIRKIIYEEGYEINEGKFRLQYAHQRQEVTGLIVNKEVAIPQKRINELENAIYYCKKYGVVDHMSHIGCEKGFYKEHLYGLAYYIKMVNPEKGLKYLLQLNEIEWPI

SEQ ID NO: 1549 - protein, 337 aa, unidentified
  source 1..337: note = uncultivated organism;MG173-6
MENYSHLLATKMRESSYSEEYIKLCVHYVNRLEANKATIIFDPDHLSLLSGYSKKRINSLIRNRQDNYRKVGIKKKSGGHRVLELPEEDLKNLQQWILANILENIPVSRYSKAFKKGLSIIDNAKPHLRKECVINIDISNFFWSISAKSIHKLFRKLGYTKEMSSLFTKICTFNNHLPQGAPTSPYLANLVCKSLDSEIIRILKGKKISYTRYADDLTFSGNKDMVNYLDQLQAIVRSQGFQVNDSKTRIQYSNQRQLVTGIIVNRKLSVPKELTKKLRQEIHYCKQFGVNGHMQRREINKSAYKEYLFGIAYFIKMVSPKLGRRFIKQLREIYWEY

SEQ ID NO: 1550 - protein, 336 aa, unidentified
  source 1..336: note = uncultivated organism;MG173-7
MEYITSLQKALEQSNYDNEGKGKILQYAEKLLRNNLPVIFDKNHLAKLMGIELSTLTYYAVNTDSFYKKYKIPKKAGGFRKIHSPSYNLKLIQKWILNKILYKYEIHSAATGFVPNSSILNNALPHVNQRLVYNLDIKDFFPAIKISRVFYLFYNKGYTKELSYFFAKLLTYKESLPQGSPASPCIANIICTNMDFSLSKLSERVKANYTRYADDLTFSGDFNVNIVSKIIYKIINNNGFEIQEKKERVQFHYNMQEVTGLIVNDGVKVKRKLKKELDKHIYFSNKYGVFNHLQKIEMEDKSFFKEYLFGLAAYVKMIEEEKGKEYFKKLNDINWL

SEQ ID NO: 1551 - protein, 318 aa, unidentified
  source 1..318: note = uncultivated organism;MG173-8
MVFFGGNMIPKLISVQQLKKLFKIELTCDIEGFVENNNQVYPRIKKNGEIRFISSPTIHLKSIQKWIVEHILSKKDCSEFCHAYVKEKSIFTNAGTHIGNQNLLKMDIHNFFDSIPHISVKNIFITMGYNLEVSHSLALLCTYKGYVRQGFVSSPMISNIIMKEFDDWIIKSLHEEEYLKFDFKYSRYADDIAISSKKKAVVPLVTIKENISDYLEKHGFIVNNDKIKLIKGKGPKLITGIVVKNNSISVPNKYKRKLLKELYYCEKYGVESHLLYTGQYGKTNYKEYLLGIAMYIKNTDYQFYNTIRERIDALNIDY

SEQ ID NO: 1552 - protein, 337 aa, unidentified
  source 1..337: note = uncultivated organism;MG173-9
MSQFKEQVTLDVPVFNSIEELRESIGVKKIYFYKVLYCNDRLYKQISIPKRSGGIRILNVPPIALKEIQRWILDNILYKVQPEPCATGFMPNKSIISNAAPHLKKKYVLKMDIKDFFPSITFYEIRNIFFEFGYEKSIATALANICTYQNNLPQGAPTSPYLANLVCRNMDKRIFKLCQKHQISYTRYADDITVSGSSKIFWLKNVIEEIIVQYQFSLNNEKTVFLKPGDRKRITGIIVNEKLSVPRSVTRNLRKEIYFLKKFGLDEHLQKIDFEGTPEQYISHLYGVASYVKMVELNKGIFFINQLNSVFHKDNQHENDELLSISPPPIDWSIFDN

SEQ ID NO: 1553 - protein, 345 aa, unidentified
  source 1..345: note = uncultivated organism;MG173-10
MENIVFQNINRSSLAENEKNQLKIIARSLLINGVPVILDIHQARLLFGIDGEIGIFVHKHCVQYSVLKKNKEERIIYQPSYKLKKIQRWIVNNILSKIKISESCHAFVPGRSILSNAKVHVHEEPFWIYKTDIINFFGEINFLAVKDIFLSVGYSQDVSEILTSLCMYDGVLAQGFPTSPVISNIVLSNFDEDLDAISQKYNFVYSRYADDITVSGTQLKNKDIEKIKNIITYKLHSLGFEINRNKTKFFGYKADKKVTGVVIKNGQLFCPQKYKKLLNKELYYINKYGVDSHLIHNEKTLISNYIGYLYGYAGYIKMIEPDVGDEYVKKLNSIFWDSNFEQDPS

SEQ ID NO: 1554 - protein, 343 aa, unidentified
  source 1..343: note = uncultivated organism;MG192-1
MITENHIQALKASTDADSFVQAMMPGVDYLIDSKRSKLEHSEIVKVVKNFELFTSSASIRRYRTFEIPKKSGGSRKIEAPVLPLKTLQRLILLFLESVYDAPAQVHGFVKDRSIITNAMSHSNKAHVLNIDIEQFFNSVRQTRVRALFNKHLGFSQYSSLMLSKLMCHRGCLPMGAPTSPLVTNLIFQRADKRIFAASKKMNVTYTRYADDLSFSCDSVESLHRTKRLIAVIIRQEGFKVNPKKTRLLHRADCQSVTGLVVNDKVNVLRTYRRTTRAINHRLEISIKEHSGDTNMALIAASEYHAMKTGQNDARPPISHLNFIKGRQAFEYGVLKSSQSPEES

SEQ ID NO: 1555 - protein, 566 aa, unidentified
  source 1..566: note = uncultivated organism;MG154-3
MLRNNKEDGSILTYKNKNISISRNGKSRLGVVTLLGNVRIIDMTADEASTLNYADKDLETSDKNHKVNSDIIPEYLLKNKKILRELASINFTEMIDKLNLNAPFSNENIVVMDSLGSVQTDEEKQKSITLIPKEAFYLENWNLDEFAMDIRSFFINYYKIKEDNEDSMNISIFEKDGEHHLILTGYRGKERDKFMHVPPSSTTYRKVVNKELINKNNIKRFVVATYKTGSRKKAEEILRLLKHKVVTAFIHLMEVKDKYDEEGKSMYYHFNLEQKNNKVREIYAPYDDVKEALRHLLLPLDKMFEKKAKNAEETIQFAYRNGLSIKDNAEVHKDNKYVVKVDVKSFFDSCNWSLAKKYLGHLFRRSNLSVKEIDDFLDNLKDCFINKETDGLYMGSPVSGVLSNLIMRPVASYLYNIFNDKNIKVSIYADDITVSSNNPLSRKYVEETINYVFEFYDLPFILKDEKTKSLKNNGRRITGVRINHNDQMTVDRRNYRLMRSMLANMSKGIQPTMKKSEIQGRLNYYLFIDDTGKFRSLAEKYFDVLKANHIDVSLKGQVTFDRYMDM

SEQ ID NO: 1556 - protein, 90 aa, synthetic construct
  source 1..90: note = MG155-4
NSDIIPEYLLKNKKILRELASINFTEMIDKLNLNAPFSNENIVVMDSLGSVQTDEEKQKSITLIPKEAFYLENWNLDEFAMDIRSFFINY

SEQ ID NO: 1557 - protein, 90 aa, synthetic construct
  source 1..90: note = MG155-5
YKIKEDNEDSMNISIFEKDGEHHLILTGYRGKERDKFMHVPPSSTTYRKVVNKELINKNNIKRFVVATYKTGSRKKAEEILRLLKHKVVT

SEQ ID NO: 1558 - protein, 90 aa, synthetic construct
  source 1..90: note = MG173-1
AFIHLMEVKDKYDEEGKSMYYHFNLEQKNNKVREIYAPYDDVKEALRHLLLPLDKMFEKKAKNAEETIQFAYRNGLSIKDNAEVHKDNKY

SEQ ID NO: 1559 - protein, 90 aa, synthetic construct
  source 1..90: note = MG173-2
VVKVDVKSFFDSCNWSLAKKYLGHLFRRSNLSVKEIDDFLDNLKDCFINKETDGLYMGSPVSGVLSNLIMRPVASYLYNIFNDKNIKVSI

SEQ ID NO: 1560 - protein, 90 aa, synthetic construct
  source 1..90: note = MG173-3
YADDITVSSNNPLSRKYVEETINYVFEFYDLPFILKDEKTKSLKNNGRRITGVRINHNDQMTVDRRNYRLMRSMLANMSKGIQPTMKKSE

SEQ ID NO: 1561 - protein, 49 aa, synthetic construct
  source 1..49: note = MG173-4
IQGRLNYYLFIDDTGKFRSLAEKYFDVLKANHIDVSLKGQVTFDRYMDM

SEQ ID NO: 1562 - DNA, 1005 bp, synthetic construct
  source 1..1005: mol_type = other DNA; note = MG173-5
atggaacacatcgagaaggcttaccaggctggcgtaattaccgaagaggagaagagattgattgaggaatataaccaacgtctgaccgataacaatgttccggtgatctataacttaagacacctgcgccagctgcttggaatccacaagtcagctcaagaccgcctctttggggacaagaagtgtgatagctatcgtgtattccacattccgaagaagaacggtggactccgcgagatagaggctccaaacgaggagctcaagcgtatccggctttggattaaagagaatatcttggacaaattttccgtttctcagttcgccaaggggtttgttaagggtgtatctatatacgataatgccgtccaacacaccggtaaggaactcgtcgtaaacatcgatctcaaggacttcttcccgagtattcaataccgagagatctacaaaatattcaaatacataggatacactgattccgtcagcaagttattgacaaatctttgcactaacgcgcgctccgtcttaccgcaaggttccccggctagcccgacgatatcgaatctcgtgagtctcaagcttgacaaacgtctgggcagactggcggataaaataggtgctagttacacacggtacgcagatgacattacattcagtggcaagaagacgattcagaaatacatagagcttatacgtaagatcatctacgaggaaggctacgagataaacgagggtaagttcagacttcaatacgcacaccaacgccaagaggtcactgggttgatagtcaacaaggaagttgccatacctcaaaagcgcatcaacgagctcgaaaacgctatctattattgcaagaagtacggagtcgtagatcatatgtctcacattggatgtgaaaagggcttctacaaggagcacctctacggccttgcatactatatcaagatggtaaaccctgaaaaggggttgaagtacctgctgcaattaaacgagattgagtggccgatt

SEQ ID NO: 1563 - DNA, 1011 bp, synthetic construct
  source 1..1011: mol_type = other DNA; note = MG173-6
atggagaactattcacatcttcttgccaccaaaatgagagagtcttcatattcagaagaatacataaagctttgcgttcactatgtgaaccgcttagaagcgaacaaggctacgattattttcgatcctgaccaccttagcttgctgtcaggttattcgaagaagcgtatcaacagcttaatccgaaaccgtcaagataactaccgcaaggtaggcatcaagaagaagtctggcgggcatcgcgtcttagaactgccagaggaagaccttaagaaccttcaacaatggatcttagcaaacatcttagagaacatcccggttagtcgatacagtaaggcctttaagaagggactcagtataattgataatgccaagccccatttgcgcaaagaatgcgtgatcaatatagacatttcaaacttcttttggtccattagcgcgaagagtatccacaagctgtttcgcaagttaggttatacaaaggaaatgtcatccttgtttactaagatttgtacattcaataatcaccttccgcagggcgcacctacatctccgtacttagcgaacttagtgtgtaagtccctggacagtgagattatccgcatacttaaggggaagaagatctcatacacgcgctacgctgatgacctcacattttcgggaaacaaggatatggttaactatctcgatcaactccaggcgatcgttcgatctcaaggttttcaagtcaatgactccaagactcgtatacaatatagtaatcaacgccaattagttaccgggattatcgtaaaccggaagctgagtgttccaaaagagttgaccaagaagttacggcaagagatccactactgtaaacaattcggcgtaaatggacacatgcaaagacgtgaaattaacaaatcagcatacaaggagtacttattcggaatagcttacttcatcaagatggtttctccgaagctgggtcggcgtttcatcaagcagctccgtgagatttactgggagtac

SEQ ID NO: 1564 - DNA, 1008 bp, synthetic construct
  source 1..1008: mol_type = other DNA; note = MG173-7
atggagtacatcacgagtcttcagaaggccctggagcaatcaaactatgataacgagggtaaggggaagatccttcaatacgctgagaagctgcttagaaacaatcttcctgttatctttgacaagaaccatcttgctaaactgatgggcattgagctgtctacacttacctactatgcggtaaacaccgatagcttttacaagaagtataaaattcctaagaaagcgggcggcttccgtaagatccatagcccttcttacaacctgaagctgattcaaaagtggattttaaataaaatattatacaagtacgaaatccactccgcagctactgggttcgtccctaactcatccattttgaacaacgctcttccacatgttaatcaacgtctggtctacaaccttgacatcaaagacttcttcccggccattaaaatctcacgcgttttctatctcttttacaataagggatacacaaaggagctcagttacttcttcgctaagctgcttacttataaagaatcattgccccaaggtagtccggcctctccttgtatcgcaaacatcatttgcaccaatatggactttagccttagtaagctctcggagcgggtgaaggccaattacacccggtacgcagacgatctgacattctctggggacttcaacgtcaatattgtaagcaaaatcatctataagataatcaacaataacggctttgagatacaggagaagaaagagcgcgtccagtttcactataacatgcaagaggttacgggtcttatcgttaacgacggcgtgaaggtcaaacgaaaactcaagaaggaattggataaacatatctacttctcgaacaaatacggggttttcaaccacttacagaagatcgagatggaagataaaagcttcttcaaggaatatctgttcggattagctgcatacgtgaagatgatagaggaagaaaagggcaaggagtactttaagaagttaaatgacatcaactggtta

SEQ ID NO: 1565 - DNA, 954 bp, synthetic construct
  source 1..954: mol_type = other DNA; note = MG173-8
atggtattcttcggtggtaatatgattccaaagctgatatctgttcaacagctgaagaagttattcaagattgagttaacctgcgacattgagggatttgtagagaataacaaccaagtataccctcgtataaagaagaacggtgagattcgtttcatttcgtcacccacaatacacctcaagtctatacagaaatggatagtagaacatatactgtctaagaaggattgttcagagttctgtcatgcctacgtaaaagagaagagcatattcaccaacgcaggcacgcatatcggcaatcagaacttattgaagatggacatccacaacttcttcgactcaattccccatatttcggttaagaatatctttataacgatgggttataacctcgaggttagccattcattagcactgctttgcacttacaaggggtacgttcgccagggtttcgtgtcctctcctatgatttctaatataatcatgaaggaattcgacgattggattataaagtcgctccacgaggaagagtacctcaagtttgatttcaagtatagcagatacgctgacgatattgccatctcctcaaagaagaaggccgtagtgcctctggtgacaattaaagagaacataagtgactacttagaaaagcacggcttcatcgtcaacaacgacaaaattaagttaattaagggaaagggcccgaagcttattaccggaatcgttgttaagaataacagcatttcagtgccgaataagtacaagcgtaaactgctcaaagagttatattattgcgagaaatacggcgtagaatcccacttactctacacagggcaatacggaaagacgaattacaaggagtacttgttaggcatcgctatgtatattaagaatacggattatcaattttacaacaccatccgtgagcgtatcgatgcgctgaacattgattac

SEQ ID NO: 1566 - DNA, 1011 bp, synthetic construct
  source 1..1011: mol_type = other DNA; note = MG173-9
atgtcacaattcaaggagcaagtgactcttgatgtacctgtgttcaatagcattgaggagttgagagaatcgattggggttaagaagatctacttttataaagttttgtactgtaatgaccgcctttacaagcagatctcaataccaaagcgcagtggtggtatccgtatacttaatgtaccacccatagctcttaaagagatccaaagatggattttggacaatatcttatataaggtacaacctgaaccttgcgcaacaggctttatgcctaacaagtcgatcatcagcaacgcggcacctcatttgaagaagaagtacgttttaaagatggacatcaaggatttcttccccagtattactttctacgagatccgtaatattttcttcgagtttggttacgagaaaagcatcgcgactgcactggcaaacatatgcacataccaaaacaacttaccccaaggagcacccacgagcccatatttagccaatttggtgtgtcgaaacatggacaagcggatatttaagctgtgtcaaaagcaccaaatttcgtacacccggtacgctgacgacataactgtttcgggcagctcaaagatcttctggttaaagaacgttatcgaggaaattattgtacaatatcaattctccctcaacaacgagaagacagtattccttaagcccggtgaccgcaagagaataacagggataatcgttaacgaaaagctctctgttcctcggtcagttacgcgtaatcttagaaaggagatctactttctgaagaagttcggactggatgaacacttgcaaaagatcgattttgaaggtacgccagaacagtacatcagccacctttatggtgttgcaagctacgtaaagatggttgagttaaataaagggattttcttcatcaaccaacttaattcggttttccataaggacaaccagcacgagaatgatgaactgctttccatctcccctcctcctatagactggagcatcttcgacaat

SEQ ID NO: 1567 - DNA, 1035 bp, synthetic construct
  source 1..1035: mol_type = other DNA; note = MG173-10
atggagaacattgtcttccagaacataaatcgctcttcccttgccgagaacgaaaagaaccagcttaaaattatcgcgcgatcacttctcattaatggagtgccggtgatcttggacattcatcaggcccgcttactgttcgggattgacggcgagattggcattttcgttcacaagcattgtgtacaatattcagtgctgaagaagaacaaggaagagcggatcatataccaaccatcatacaaactgaagaaaattcaacgatggatcgtaaacaacatcttgtctaagatcaagataagcgaatcctgccatgcgtttgtgccagggcgctcgatcttatcaaacgccaaggtgcatgttcatgaagagccgttttggatctataaaaccgacattattaatttcttcggagaaataaacttcttagccgttaaggatatattcctctcggtaggttattcacaggacgtgtcagagatccttacttcattatgtatgtacgacggagtattggcacaaggttttccgacatcgccagtgatcagcaacattgtgctgtctaatttcgatgaagacttagacgcaatctcacaaaagtacaactttgtgtattcccgttacgctgatgacataacagtaagcggtactcaattgaagaacaaggatattgagaagatcaagaacatcatcacatacaaattgcactctttggggttcgagattaaccggaataaaacgaagttctttggatataaggcagacaagaaggtaacaggtgtggtgataaagaatgggcaattattttgtcctcagaagtacaagaagttgcttaacaaggaactgtactacattaataagtatggtgttgattcccacctcatccacaacgaaaagaccctgatctcaaattacattggatacctttacggatacgctgggtacatcaaaatgatcgagccagatgttggagatgaatacgttaagaagttaaattcaatcttctgggacagcaactttgaacaagatccctca

SEQ ID NO: 1568 - DNA, 1029 bp, synthetic construct
  source 1..1029: mol_type = other DNA; note = MG192-1
atgatcacggagaatcacatacaagcattaaaggcttccactgatgcggacagtttcgtgcaagcaatgatgccgggagtagattacctcatagactcaaagcgatctaaactggagcactccgagatcgtcaaggtagtgaagaactttgagcttttcacgtcttcagcaagtatccgacgctaccgtacttttgagatccccaagaagagtggcgggtcacgtaagatcgaagcacctgtgcttcccttgaagacactgcaacgcctcattttgctgttcttagaaagtgtttacgacgctcctgcgcaagtccatggtttcgttaaagaccgctcaatcattacaaacgcaatgtcacactcaaacaaggctcacgtgcttaacattgatatagagcagttcttcaactcggtgagacaaactcgtgtgcgcgccttgttcaacaagcaccttggctttagccaatattcgtcattaatgctgtcgaagttaatgtgccatcgtggatgcttgccaatgggtgctccgacatcgccactggtgactaatttgatcttccaacgcgcggataagcgtatcttcgcggcctctaagaaaatgaacgtaacatatacccgctacgccgatgacctttcatttagctgcgactccgtagagtcgctgcacagaacgaagcggctgattgccgtcattatacggcaggaagggttcaaagtcaacccgaagaagactcgactgttgcaccgtgccgactgtcaatccgtgactggtttggttgtcaatgacaaggttaatgtattacgcacttaccgtagaacaacacgtgcaatcaaccacagattggagataagtatcaaggaacacagcggggacacaaatatggcccttattgcagcatcagaatatcacgcaatgaaaacaggacagaacgatgctagaccgccaatatctcacttaaacttcattaaaggccgacaagcctttgaatatggtgtcctcaagtcctcacagagtccagaggagtct

SEQ ID NO: 1569 - DNA, 969 bp, synthetic construct
  source 1..969: mol_type = other DNA; note = N-Strep-MG155-4
atggctagcgcatggagtcatcctcaattcgaaaaatccggaatgttggtcatcaatgatttaggcaagagacttaatcagtccgatttagcggtcaaggcgtttcttgagaatgccccaagaaagtataaggtttatcggattcccaaacgcaccaccggcttccgcataatcgcgcagcccgcgaaggagcttaaggcgtatcagagagctttcattgagttgttccattttcccgtccatgagtgcgccacggcgtaccaagagggtaaatcaattagagataacgcattggtccacgcacggaatccttacttactcaagactgaccttgaggatttctttaacagcttaacgccggacatattttggcagtgtatcgaacattgcagtgcagacgcgcctgaattccttaaagaggaacgacgttatgttgaaagactgcttttctggcaacctgccaaacgatctaaacgcctgatcttaagtgttggtgctccatcttctccggtgatatccaacttctgtctgctggagttggatcggcgcatatctgaggaatgccggcaccttgaagtggattacacacggtatgcggacgatcttacattctccacgcgcatccccggggtactctcagccatcccggctcttatcgattcgttgctgaagcaactctacaattcgaaattacgactgaacagaggtaaaactctgttcagcagccgagcacacaatagacacgtgaccggagttactttgaacaatgagggagaactttctctgggcagagagcgtaaacgttttatcaagcacttaatccaccaatacgataccttagacaaagaggataaggcctatcttgttggtttgttggcgttcgcctcacatattgaacctgaattcattatacggatgaatgccaaatacacaacagagctgatggatcgcatacgccgtcaacaatga

SEQ ID NO: 1570 - DNA, 984 bp, synthetic construct
  source 1..984: mol_type = other DNA; note = N-Strep-MG155-5
atggctagcgcatggagtcatcctcaattcgaaaaatccggagtcgtagggttattagcctcgaagttagacgataaacctagtcccaaggttgttgaagcattcctgcgggatgccgctagaaagtattgcgtattcaaaatcccgaagcgtactcaaggctttcgtgtaatagctcaaccttcgagagagctccaacgttaccagagaacctttctcgacaacttttcgttgcctgtacacagtgccgcgatggcttaccgcaagggtcaatcaatcaaggagaacgcagaagcccacttgaaacagaagttcttgctgcgaatggacctggagaacttcttcaactccatcaagccagctctgttttgttcagtatggcaatccttcgcagatctcccaagtcttgacgaaacggacgtcggattgatcaaccagttgctcttctggtgtccttcgcagcgtcgaggtggtaagctggtgttatctgttggtgcaccaacaagcccaatggtttccaacttttgtctgtatcactttgaccaagcactgacagagttctgtgatactgaacgaatagtgtacaccagatatgcggatgaccttacattttctaccaatatgccaaacgttctggagaagataccgaaacaagttcaaaagttgttgaaggaaaagttgacaggcaagaattatcaattacgtgtgaaccgtatcaagaccgttttctcgtccaaacgttacaatcgccacgttacgggtataactctggccagtacgggcaagctctccatcggccgcgagagaaagcggtatataaaacatttagtccaccagttcaagatgggcgaactggagaaggtggaagatattgcccaccttaagggcctgtgggcctttgccaaacatatagaaccggagttctgcagagccctggagcgcaagtacggtcttgttacgatgcagcgtattaaagaggcttga

SEQ ID NO: 1571 - DNA, 1059 bp, synthetic construct
  source 1..1059: mol_type = other DNA; note = N-Strep-MG173-1
atggctagcgcatggagtcatcctcaattcgaaaaatccggaatggagaagaatctcaaatctgtctaccttggccgtcttcaaaacgccttggaagcccaacaacgcacaaaagaggagatcatcacctgtacccaatatgctcagaagttgatggctgataatctccccgtcttatttgaagaaaaccacgtttatcaagttcttaagtggaagaaatcgaaccagcaacagtatcatactttctacctcgtccaaaagggcaaggagagaaagatcaccgcgccctcgcgagagctgaagcgaagacaaagatggattctcgacaacatacttattaaattgaaagtgtccgactacgcgcacggtttcgtcaagaaccgctcaatcagaactaacgcagaacttcacatgacccacgattacgcactttgcatggatatagaggacttctttccgagcataaaagaggacacggtcaaagaggtcttcgcacgcgcgggatactcccgtcgagctgcgaacgcgttggctgacatgtgctgttacttcggagcattgccacaaggggcaccaacatccccctatctggccaacttagttttcatcgaaaaggaccatgaactggcgcttctggctaaacaacatgacgcgacatacagtcgatatgctgacgacttaaccttctcttccgacaatcccttagggaatcttagtgaagcagtgaaccaagtgttacaaaacaacggattccgattgaacgacagcaagacgaaggagttcttcccgggtcaaccgaaacgaatcacggggttaatcgtgcaaaatgggctgatacgagtaccgcgcaagtttaagcgcacacttaagcaagagatatactactgcaagaaatatggagttgctctgcatctggagaatacgcgggcccacaaggccataaactatcgggagtatctttatggtaaggcgtattatgtcaacatgattgaaccagagctgggcaagcattatcttaagcaattagatgaaatcctctggccctcttactatttatga

SEQ ID NO: 1572 - DNA, 1056 bp, synthetic construct
  source 1..1056: mol_type = other DNA; note = N-Strep-MG173-2
atggctagcgcatggagtcatcctcaattcgaaaaatccggaatgtcgtatgtgcaaaagttaaaagacaagatggtagagcaaggcgaggacgaaaattacgtggaactgtgcgtctcgtatacacagaagctttgcaacaattctgttccagtgatctttgactttaagcaccttagccttttactgggatacgaaccgccagagctggccttttacctgtttgctcctgaggattccttctacacgaaaatgcaaattccgaagaagtctggtggcatgcgtgagattgagattccgtccgacaagttgaagtcaattcaacgctggattctgcgcaatgtattagagaatatcgaagtccatgagtcatgttacgggttcacgaagggcaaatcaatctatgataacgcgcttttacacgttggaaaggagtgcgtattaaatatggatcttaaggacttcttcccaagcattactcagaaggcggtgtttaatatcttttaccaaaagggttacacaaagtcggtatcctattacctcgcgaaattattgactaaggatggcgtattaccgcaagggtcaccggctagcccgaagatctccaacattgtagcattacacttagacaagcggctgagcgagcttgctaagtgttataaagcaacttacagtcggtacgcagacgatctgaccttctcaggggcttcaaacatcaagaatatgattccaataattacgcagatcatacatgaagaggcgttcttcgtaaacgagaagaaaacccgttacagttactatttccagaaacaagaagttacgggcctgatcgtgaacaagaaggttagcgtgcctaaagaataccttcgggaattgaacaaggagatttactattgtaagaaatttggagtcagctctcatctgacgaagatcgagaatcacaagagtttctttaaggaatacatgtacggcaaggcttattttgttaatatgatagacaaggagttgggtcagaagatattatgcgagttggacaccatattatgggagtactga

SEQ ID NO: 1573 - DNA, 1038 bp, synthetic construct
  source 1..1038: mol_type = other DNA; note = N-Strep-MG173-3
atggctagcgcatggagtcatcctcaattcgaaaaatccggaatggggaagtacaagtatatagaccggttgcgtcaagcaatggaaggcaagtatagcgaggagtatattaactattgcgcagagtacgcggctaagctgttagacaagaatctcccggtgatctacgatgcccgacacgttgacgagatcttgcgactgcatgggatcaagccagactgttaccacatcttcgtcatcgctggcaagaacaaagagcggaaaattacagctccatcacgggagataaagcagcggcagcagtggatccttgaagaaatacttggaaagcaagacgtctccgacaactgccacggcttcgtaaagaaacgttccatcttaacgaacgccaagatgcacatgggccacaagaacatactgaacctcgatatacggaacttcttcccgagcatcaccgagacaatggtcatattccaattccagcagatgggctattcaaagtcagccgcggaagctctggccggggtgtgttgttacgagggcaaactccctcaaggtgccccgacatcaccgtacatgtcaaatctcattttgaagaatatggaccaagacttagaaaatttctgccaaaagaagggcataacttacacgcgttacgccgacgatatgtcgttttccagcaatgaggagatcgagggattctttaaagatattaagttcatcatcggcaagtactccttcgaaatcaacgaaaagaagacatgttactaccaggatccataccgtaagatcgtaactgggcttgtggtgaaggagaacaaggtctgtatccctaagaagttcaagcgtaagttccgccaagagatatattattgtagacacttgggagtacagcgtcatcttgagaacacgggtaatcaagaacgtgcgggattccgggaatacatgtatggaaaggcgtacttcattgcaatggtggagccggaagcaggtaagaagtacttggaagcactggatgagatcgagtggggttattga

SEQ ID NO: 1574 - DNA, 1014 bp, synthetic construct
  source 1..1014: mol_type = other DNA; note = N-Strep-MG173-4
atggctagcgcatggagtcatcctcaattcgaaaaatccggaatgaaagaacgcgcctttgcggaagaagagataagcgcatgctgtaattacgcaagcgttcttctgtccaagaacctgcccgtacttttcgacgcccaacatataaacatagtactgcagttgcacaaaatcaactctgctgcatatcacacgtttacgatacctcaagctgagaaattccgtacaataacggccccgtctaagccgcttaagcaaagacagaaatggattctgcaagagattctgagtaaggtcgatgtgtccgagtacgctcacgggttcgagccaggacgaagcatcaaaaccaacgcactcttacacgcaaaccatgcatatgcagtttgtatggacattaaggacttcttcccctcagtacactacgacagtatatgtaatgtctttctttctataggatacagttcttcagccgcacacctgcttgctgatatatgttcctacaacggagcactgccgcaaggagcgccgacgagtcctaagttagctaacataatcttctctcccctggatgagaagcttgccgccattgcgaaggaagagcgtgctgtctacagtagatatgccgacgatctcaccttcagcggtgaccacgatctgaagataatttacgctcgtgtaaagaacctgctcgagagatatgagttccggttgaatgaagagaaaactcactcctacggtcctggtgtgcctaagagaataacggggcttgttgtgcaaaacggaacagttcgcgttccaaaatattttaagcggagcctgcgccaagaaattcactactgcttgaaatatggtgtccttacgcacctggagaatgttaagagcacgcactgcatcaattatcgggagtacctttatggcaaagcttatttcattcatatggtcgaacctcaagagggaaacagatacctggaaaagttggatcagatcgactggcctagtagctttctcgtttga

SEQ ID NO: 1575 - DNA, 1050 bp, synthetic construct
  source 1..1050: mol_type = other DNA; note = N-Strep-MG173-5
atggctagcgcatggagtcatcctcaattcgaaaaatccggaatggaacacatcgagaaggcttaccaggctggcgtaattaccgaagaggagaagagattgattgaggaatataaccaacgtctgaccgataacaatgttccggtgatctataacttaagacacctgcgccagctgcttggaatccacaagtcagctcaagaccgcctctttggggacaagaagtgtgatagctatcgtgtattccacattccgaagaagaacggtggactccgcgagatagaggctccaaacgaggagctcaagcgtatccggctttggattaaagagaatatcttggacaaattttccgtttctcagttcgccaaggggtttgttaagggtgtatctatatacgataatgccgtccaacacaccggtaaggaactcgtcgtaaacatcgatctcaaggacttcttcccgagtattcaataccgagagatctacaaaatattcaaatacataggatacactgattccgtcagcaagttattgacaaatctttgcactaacgcgcgctccgtcttaccgcaaggttccccggctagcccgacgatatcgaatctcgtgagtctcaagcttgacaaacgtctgggcagactggcggataaaataggtgctagttacacacggtacgcagatgacattacattcagtggcaagaagacgattcagaaatacatagagcttatacgtaagatcatctacgaggaaggctacgagataaacgagggtaagttcagacttcaatacgcacaccaacgccaagaggtcactgggttgatagtcaacaaggaagttgccatacctcaaaagcgcatcaacgagctcgaaaacgctatctattattgcaagaagtacggagtcgtagatcatatgtctcacattggatgtgaaaagggcttctacaaggagcacctctacggccttgcatactatatcaagatggtaaaccctgaaaaggggttgaagtacctgctgcaattaaacgagattgagtggccgatttga

SEQ ID NO: 1576 - DNA, 1056 bp, synthetic construct
  source 1..1056: mol_type = other DNA; note = N-Strep-MG173-6
atggctagcgcatggagtcatcctcaattcgaaaaatccggaatggagaactattcacatcttcttgccaccaaaatgagagagtcttcatattcagaagaatacataaagctttgcgttcactatgtgaaccgcttagaagcgaacaaggctacgattattttcgatcctgaccaccttagcttgctgtcaggttattcgaagaagcgtatcaacagcttaatccgaaaccgtcaagataactaccgcaaggtaggcatcaagaagaagtctggcgggcatcgcgtcttagaactgccagaggaagaccttaagaaccttcaacaatggatcttagcaaacatcttagagaacatcccggttagtcgatacagtaaggcctttaagaagggactcagtataattgataatgccaagccccatttgcgcaaagaatgcgtgatcaatatagacatttcaaacttcttttggtccattagcgcgaagagtatccacaagctgtttcgcaagttaggttatacaaaggaaatgtcatccttgtttactaagatttgtacattcaataatcaccttccgcagggcgcacctacatctccgtacttagcgaacttagtgtgtaagtccctggacagtgagattatccgcatacttaaggggaagaagatctcatacacgcgctacgctgatgacctcacattttcgggaaacaaggatatggttaactatctcgatcaactccaggcgatcgttcgatctcaaggttttcaagtcaatgactccaagactcgtatacaatatagtaatcaacgccaattagttaccgggattatcgtaaaccggaagctgagtgttccaaaagagttgaccaagaagttacggcaagagatccactactgtaaacaattcggcgtaaatggacacatgcaaagacgtgaaattaacaaatcagcatacaaggagtacttattcggaatagcttacttcatcaagatggtttctccgaagctgggtcggcgtttcatcaagcagctccgtgagatttactgggagtactga

SEQ ID NO: 1577 - DNA, 1053 bp, synthetic construct
  source 1..1053: mol_type = other DNA; note = N-Strep-MG173-7
atggctagcgcatggagtcatcctcaattcgaaaaatccggaatggagtacatcacgagtcttcagaaggccctggagcaatcaaactatgataacgagggtaaggggaagatccttcaatacgctgagaagctgcttagaaacaatcttcctgttatctttgacaagaaccatcttgctaaactgatgggcattgagctgtctacacttacctactatgcggtaaacaccgatagcttttacaagaagtataaaattcctaagaaagcgggcggcttccgtaagatccatagcccttcttacaacctgaagctgattcaaaagtggattttaaataaaatattatacaagtacgaaatccactccgcagctactgggttcgtccctaactcatccattttgaacaacgctcttccacatgttaatcaacgtctggtctacaaccttgacatcaaagacttcttcccggccattaaaatctcacgcgttttctatctcttttacaataagggatacacaaaggagctcagttacttcttcgctaagctgcttacttataaagaatcattgccccaaggtagtccggcctctccttgtatcgcaaacatcatttgcaccaatatggactttagccttagtaagctctcggagcgggtgaaggccaattacacccggtacgcagacgatctgacattctctggggacttcaacgtcaatattgtaagcaaaatcatctataagataatcaacaataacggctttgagatacaggagaagaaagagcgcgtccagtttcactataacatgcaagaggttacgggtcttatcgttaacgacggcgtgaaggtcaaacgaaaactcaagaaggaattggataaacatatctacttctcgaacaaatacggggttttcaaccacttacagaagatcgagatggaagataaaagcttcttcaaggaatatctgttcggattagctgcatacgtgaagatgatagaggaagaaaagggcaaggagtactttaagaagttaaatgacatcaactggttatga

SEQ ID NO: 1578 - DNA, 999 bp, synthetic construct
  source 1..999: mol_type = other DNA; note = N-Strep-MG173-8
atggctagcgcatggagtcatcctcaattcgaaaaatccggaatggtattcttcggtggtaatatgattccaaagctgatatctgttcaacagctgaagaagttattcaagattgagttaacctgcgacattgagggatttgtagagaataacaaccaagtataccctcgtataaagaagaacggtgagattcgtttcatttcgtcacccacaatacacctcaagtctatacagaaatggatagtagaacatatactgtctaagaaggattgttcagagttctgtcatgcctacgtaaaagagaagagcatattcaccaacgcaggcacgcatatcggcaatcagaacttattgaagatggacatccacaacttcttcgactcaattccccatatttcggttaagaatatctttataacgatgggttataacctcgaggttagccattcattagcactgctttgcacttacaaggggtacgttcgccagggtttcgtgtcctctcctatgatttctaatataatcatgaaggaattcgacgattggattataaagtcgctccacgaggaagagtacctcaagtttgatttcaagtatagcagatacgctgacgatattgccatctcctcaaagaagaaggccgtagtgcctctggtgacaattaaagagaacataagtgactacttagaaaagcacggcttcatcgtcaacaacgacaaaattaagttaattaagggaaagggcccgaagcttattaccggaatcgttgttaagaataacagcatttcagtgccgaataagtacaagcgtaaactgctcaaagagttatattattgcgagaaatacggcgtagaatcccacttactctacacagggcaatacggaaagacgaattacaaggagtacttgttaggcatcgctatgtatattaagaatacggattatcaattttacaacaccatccgtgagcgtatcgatgcgctgaacattgattactga

SEQ ID NO: 1579 - DNA, 1056 bp, synthetic construct
  source 1..1056: mol_type = other DNA; note = N-Strep-MG173-9
atggctagcgcatggagtcatcctcaattcgaaaaatccggaatgtcacaattcaaggagcaagtgactcttgatgtacctgtgttcaatagcattgaggagttgagagaatcgattggggttaagaagatctacttttataaagttttgtactgtaatgaccgcctttacaagcagatctcaataccaaagcgcagtggtggtatccgtatacttaatgtaccacccatagctcttaaagagatccaaagatggattttggacaatatcttatataaggtacaacctgaaccttgcgcaacaggctttatgcctaacaagtcgatcatcagcaacgcggcacctcatttgaagaagaagtacgttttaaagatggacatcaaggatttcttccccagtattactttctacgagatccgtaatattttcttcgagtttggttacgagaaaagcatcgcgactgcactggcaaacatatgcacataccaaaacaacttaccccaaggagcacccacgagcccatatttagccaatttggtgtgtcgaaacatggacaagcggatatttaagctgtgtcaaaagcaccaaatttcgtacacccggtacgctgacgacataactgtttcgggcagctcaaagatcttctggttaaagaacgttatcgaggaaattattgtacaatatcaattctccctcaacaacgagaagacagtattccttaagcccggtgaccgcaagagaataacagggataatcgttaacgaaaagctctctgttcctcggtcagttacgcgtaatcttagaaaggagatctactttctgaagaagttcggactggatgaacacttgcaaaagatcgattttgaaggtacgccagaacagtacatcagccacctttatggtgttgcaagctacgtaaagatggttgagttaaataaagggattttcttcatcaaccaacttaattcggttttccataaggacaaccagcacgagaatgatgaactgctttccatctcccctcctcctatagactggagcatcttcgacaattga

SEQ ID NO: 1580 - DNA, 1080 bp, synthetic construct
  source 1..1080: mol_type = other DNA; note = N-Strep-MG173-10
atggctagcgcatggagtcatcctcaattcgaaaaatccggaatggagaacattgtcttccagaacataaatcgctcttcccttgccgagaacgaaaagaaccagcttaaaattatcgcgcgatcacttctcattaatggagtgccggtgatcttggacattcatcaggcccgcttactgttcgggattgacggcgagattggcattttcgttcacaagcattgtgtacaatattcagtgctgaagaagaacaaggaagagcggatcatataccaaccatcatacaaactgaagaaaattcaacgatggatcgtaaacaacatcttgtctaagatcaagataagcgaatcctgccatgcgtttgtgccagggcgctcgatcttatcaaacgccaaggtgcatgttcatgaagagccgttttggatctataaaaccgacattattaatttcttcggagaaataaacttcttagccgttaaggatatattcctctcggtaggttattcacaggacgtgtcagagatccttacttcattatgtatgtacgacggagtattggcacaaggttttccgacatcgccagtgatcagcaacattgtgctgtctaatttcgatgaagacttagacgcaatctcacaaaagtacaactttgtgtattcccgttacgctgatgacataacagtaagcggtactcaattgaagaacaaggatattgagaagatcaagaacatcatcacatacaaattgcactctttggggttcgagattaaccggaataaaacgaagttctttggatataaggcagacaagaaggtaacaggtgtggtgataaagaatgggcaattattttgtcctcagaagtacaagaagttgcttaacaaggaactgtactacattaataagtatggtgttgattcccacctcatccacaacgaaaagaccctgatctcaaattacattggatacctttacggatacgctgggtacatcaaaatgatcgagccagatgttggagatgaatacgttaagaagttaaattcaatcttctgggacagcaactttgaacaagatccctcatga

SEQ ID NO: 1581 - DNA, 1074 bp, synthetic construct
  source 1..1074: mol_type = other DNA; note = N-Strep-MG192-1
atggctagcgcatggagtcatcctcaattcgaaaaatccggaatgatcacggagaatcacatacaagcattaaaggcttccactgatgcggacagtttcgtgcaagcaatgatgccgggagtagattacctcatagactcaaagcgatctaaactggagcactccgagatcgtcaaggtagtgaagaactttgagcttttcacgtcttcagcaagtatccgacgctaccgtacttttgagatccccaagaagagtggcgggtcacgtaagatcgaagcacctgtgcttcccttgaagacactgcaacgcctcattttgctgttcttagaaagtgtttacgacgctcctgcgcaagtccatggtttcgttaaagaccgctcaatcattacaaacgcaatgtcacactcaaacaaggctcacgtgcttaacattgatatagagcagttcttcaactcggtgagacaaactcgtgtgcgcgccttgttcaacaagcaccttggctttagccaatattcgtcattaatgctgtcgaagttaatgtgccatcgtggatgcttgccaatgggtgctccgacatcgccactggtgactaatttgatcttccaacgcgcggataagcgtatcttcgcggcctctaagaaaatgaacgtaacatatacccgctacgccgatgacctttcatttagctgcgactccgtagagtcgctgcacagaacgaagcggctgattgccgtcattatacggcaggaagggttcaaagtcaacccgaagaagactcgactgttgcaccgtgccgactgtcaatccgtgactggtttggttgtcaatgacaaggttaatgtattacgcacttaccgtagaacaacacgtgcaatcaaccacagattggagataagtatcaaggaacacagcggggacacaaatatggcccttattgcagcatcagaatatcacgcaatgaaaacaggacagaacgatgctagaccgccaatatctcacttaaacttcattaaaggccgacaagcctttgaatatggtgtcctcaagtcctcacagagtccagaggagtcttga

SEQ ID NO: 1582 - RNA, 212 nt, unidentified
  source 1..212: mol_type = other RNA; note = MG155-4 ncRNA
cacctgtgtacgataagctttatcaactctttagcgtcggacgtattacgtctagtcgggtgtttagccagactctaatttattgagcgcatttggggttgcgaaagtgtcgcacccctcactcgttcctccctcgggttgcgaaactttcgcttcctccagtaaagagttaaacccggcagatttaaccctgccggtttttttcacaggtg

SEQ ID NO: 1583 - RNA, 148 nt, unidentified
  source 1..148: mol_type = other RNA; note = MG155-5 ncRNA
ctctttagttttggacagttattttgtctagtcgggtgttaagccagactgtaatttatcgaacgacattcgttgcgatcccatcgcaactaagtgctcgttcctcgctatttagttgcgacgggatcgcggcctctgagtaaagagc

SEQ ID NO: 1584 - RNA, 152 nt, unidentified
  source 1..152: mol_type = other RNA; note = MG173-1 ncRNA
gctccaagtctgctagcaaagagtgtattcgctctgaagaagacggcactaactgggtggaaggacgctaggtcgaactcgcccaagcgtcctcccaccctagagtttcaatgaacaataaagatttttcggtttcgtagtagacttggagc

SEQ ID NO: 1585 - RNA, 217 nt, unidentified
  source 1..217: mol_type = other RNA; note = MG173-2 ncRNA
gaggctatatttgttagaaaaagaaaatcaagttgattttcaaagtgaaaatgtttcatacgtttattatcaggaaaaggataatgctcttttcctgatagtaacgttatgctcgcaggagcagctgctctcataacgttactataattacaactgattggttgacaatcagttgtaatgagaattttcaattagattgggtagcaaatatagcctc

SEQ ID NO: 1586 - RNA, 169 nt, unidentified
  source 1..169: mol_type = other RNA; note = MG173-3 ncRNA
ccgtttcaagagtaattgaattgaggtgtagtcgcctccttgatgaagggggctaacatccgagcggaacaggttgctcgctcattgcattcgttcgtaacctgccccgctcgaatgattttggccacttttatgatactacaattactctttttttattaggagcatt

SEQ ID NO: 1587 - RNA, 248 nt, unidentified
  source 1..248: mol_type = other RNA; note = MG173-4 ncRNA
aggatgtcagcctgagatccattagcaagaggtgtattcgcctcggataggaacgggactaactccactgtaatgcggtcgccctcccgcgctccgcattggtcgttcgaccgcatcacagtgcagtctccctaagcgttatagtttcttcgtaatggatctcaggctttcatatatcaacgatcaacggccttaccgcagaggagtaccaatgacaggttcattctatatccaacggctgtgctccg

SEQ ID NO: 1588 - RNA, 334 nt, unidentified
  source 1..334: mol_type = other RNA; note = MG173-5 ncRNA
atgttaatattcgagcccctacacctagaatacgaagagtgtgtatctcttcaaaactacaacggcactaatagccatatgcctgcttcgggggcggcggtgctgcgcactccgctcgccaacccctccgaaggcatatgcatatggctatgcctatgtaaccaatgtgacgattgtcgtcgctccgctcctccattcgtcattcaggctttcttaacagaaagcctgaatgtcggataggttaaaacgcttacgcagttttaacctatccgacacgaatatcagactgaagtaggtgtaggggctcgtttatatttatattaaagggtgatat

SEQ ID NO: 1589 - RNA, 196 nt, unidentified
  source 1..196: mol_type = other RNA; note = MG173-6 ncRNA
attaaggagacaagattagaggtcttctagacttgggtcgcgagtcgttacccttatagcaacgtttctatttatcggaatctcgttttatcataaatagaaaatgaatatattgtattctcatatctcaccttatcaataggtaaagaatagaaaactttgtagagcctctaatcttgttgagattctatagtaa

SEQ ID NO: 1590 - RNA, 212 nt, unidentified
  source 1..212: mol_type = other RNA; note = MG173-7 ncRNA
taattaaaataacggagttgatctctagatatagcagggagtccctgttaaaaaaaatgtttctttattgatttggacataagataaaatcttatgtccaatgcaaataaatttgcattacacaagcaaaaagcgcatgtgtaaattttcaagtaagataaaatgctgatccattaacaatagtaattgagtagaggtcaactaccgtttaa

SEQ ID NO: 1591 - RNA, 207 nt, unidentified
  source 1..207: mol_type = other RNA; note = MG173-8 ncRNA
taattcttttgttttgatataatgataaagaagtagagatactaaaagttttagtcaggtatagcaaagttgctatactaacgtgattctttatgaagtaatttcatgtcatggaaaatttttctacatttacatttcgaaaaatttcccatgactttaacttacttcacaagttccgtaagttaagtacttcattccatcaactat

SEQ ID NO: 1592 - RNA, 267 nt, unidentified
  source 1..267: mol_type = other RNA; note = MG173-9 ncRNA
tctgattagcgagtcgctaatctatgaaaaaatgtttgcaataatcagtcgttaattaattcgtgaattaattaacgagagataattttcaaagaaaattatctctaggacagcatcgctttacgagggtccgtagcttatgcttgtcctacaagaaaatacttaattaaattgcaccgaaaagctctatttagttttatagagttagcactgttttttagcaaggtgcctttcagtacaatttaattaagggtatgttagttgtag

SEQ ID NO: 1593 - RNA, 191 nt, unidentified
  source 1..191: mol_type = other RNA; note = MG173-10 ncRNA
acaaaggaggtatactataaacgtggctagatgttagcaagtgactaacaagtaggtattatctattttaatacttgtttatacctgctgttcataaatttaaaaaccaaaatttatgaacaaccggaataaacaactcttaaaaagcaaaagcacgagttgtttattcctctaggtagccacgttttttt

SEQ ID NO: 1594 - RNA, 163 nt, unidentified
  source 1..163: mol_type = other RNA; note = MG154-3 ncRNA
taaaccataatatagcttaagtcatgtgtatcgcatgttaaataaagttaattcaatactcaatttaagagtttgcattagatggctatcgtccagatatgtctaacatcatatctggatggtaatgcaaatctcaaatttaattagtatattatggtttact

SEQ ID NO: 1595 - DNA, 40 bp, synthetic construct
  source 1..40: mol_type = other DNA; note = LA497_drop_off_umi
  modified_base 40: mod_base = OTHER; note = Inverted Deoxythymidine
ccatgnnnnnnnnnnnnnnagtccgatgccgccgtcaatt

SEQ ID NO: 1596 - DNA, 15 bp, synthetic construct
  source 1..15: mol_type = other DNA; note = KT10
gcaaaccgcctctcc

SEQ ID NO: 1597 - DNA, 55 bp, synthetic construct; identical to SEQ ID NO: 65
  source 1..55: mol_type = other DNA; note = LA430_umi_cdna

SEQ ID NO: 1598 - DNA, 44 bp, synthetic construct
  source 1..44: mol_type = other DNA; note = LA500_NGS_RT_plus5
  modified_base 41..44: mod_base = OTHER; note = Phosphorothioate linkage
gctcttccgatctnnnnngagacggtcacagcttgtctgtaagc

SEQ ID NO: 1599 - DNA, 34 bp, synthetic construct; identical to SEQ ID NO: 59
  source 1..34: mol_type = other DNA; note = LA396_RT_short_NGS

SEQ ID NO: 1600 - RNA, 4247 nt, synthetic construct; identical to SEQ ID NO: 896
  source 1..4247: mol_type = other RNA; note = RNA template

SEQ ID NO: 1601 - DNA, 20 bp, synthetic construct
  source 1..20: mol_type = other DNA; note = First100bp_FP
ggtttgggtttgggtttggg

SEQ ID NO: 1602 - DNA, 20 bp, synthetic construct
  source 1..20: mol_type = other DNA; note = First100bp_RP
atcctgatgggagtctcctc

SEQ ID NO: 1603 - DNA, 21 bp, synthetic construct
  source 1..21: mol_type = other DNA; note = Last100bp_FP
gagactcccaagttttggaac

SEQ ID NO: 1604 - DNA, 24 bp, synthetic construct
  source 1..24: mol_type = other DNA; note = Last100bp_RP
gggagaatggtatttactctcgaa

SEQ ID NO: 1605 - DNA, 27 bp, synthetic construct
  source 1..27: mol_type = other DNA; note = First100bp_Taqman probe_FAM
actctgtgagcggatcttggcttagcc

SEQ ID NO: 1606 - DNA, 21 bp, synthetic construct
  source 1..21: mol_type = other DNA; note = Last100bp_Taqman probe_HEX
ctggagcaaggcggcgtcagc

SEQ ID NO: 1607 - DNA, 2634 bp, synthetic construct
  source 1..2634: mol_type = other DNA; note = FH-MCP-MMLV Eng
atggactacaaagacgatgacgacaagtacccctatgatgtacctgattatgctgccagcaatttcacacagttcgtccttgtagacaacggcggcaccggggatgttacagtggccccgagcaatttcgcaaacggcgtagccgagtggatctcctctaatagcagaagccaggcttataaggttacatgctctgtaaggcagtcttccgcacaaaatagaaagtacacaatcaaggtcgaagtgcccaaggttgctacacagaccgttggtggagaggagttgccagtggctgggtggcgctcctacctgaatatggagttaacaatccccattttcgctaccaattcagactgtgaactcattgtcaaagctatgcaaggtcttcttaaggatggtaacccaattccaagtgcaattgctgctaattcaggcatttattctggcggcagcagcggcggctcaagcggaagtgaaacacctggaacttccgaaagcgctacgcctgaatcttctggtggatcttctggcggatcttccgcatgcgtcgacactctgaacatcgaggacgaatacaggctccacgaaacttctaaggaacctgacgtgtccttgggatcaacttggttgtccgacttcccccaagcttgggccgagacaggcggaatgggtttggccgtgagacaggccccactcataatcccacttaaggcgacatccactccggtcagtatcaagcagtatccaatgtcccaggaagcacgcttaggaattaaaccacatattcaacgactcctggatcaaggtattctcgtcccatgtcaaagcccttggaatacccctcttctgcctgtgaagaagcccggcacaaacgactaccggcccgtgcaagacctcagggaagtgaataaacgagtcgaggatatacatccgactgtcccgaatccctataatctgctgtcaggtctgccaccaagtcatcaatggtatacagtactggacctgaaagacgcgttcttttgtttgcgactgcatcctacgtctcaaccgctgtttgcattcgaatggcgggaccccgaaatggggatttctgggcagctgacatggactcgtcttcctcaagggtttaagaactcccctacacttttcaacgaagccctgcatcgggatttagctgattttagaatccaacatcctgatctgattctcctgcaatatgttgacgatctgctcctcgctgcaaccagtgaacttgattgtcagcagggaacgagagctttactccagactctgggcaatcttggttaccgtgcttcagctaagaaggctcagatatgtcaaaagcaagtgaaataccttggttacctgttgaaggaagggcaacgctggttaaccgaagctcgcaaggaaacagtaatgggccaacccacacccaaaacaccccgccagctgagagaatttctcggtaaggctggattttgcagactgttcattcccggtttcgccgagatggccgcacctctttatccactgacgaagcccggtaccctcttcaactggggacccgatcagcagaaagcttaccaggagattaaacaggcactgctgaccgctcccgcgctcggcctgcccgacctgacgaaaccattcgagcttttcgtggatgagaaacaaggatatgctaagggagtgctgactcagaagcttgggccgtggcgacgcccagtagcttatctcagcaagaaactggatcctgtggccgccggttggccgccatgtttgagaatggttgccgctatcgcagtcctcaccaaagacgccggtaaactgacaatggggcaacctctggtgatcctcgctccgcacgctgtggaagccttagtgaagcagccacctgataggtggttaagcaatgcgagaatgacccattaccaagcgttattgctggataccgatagagtgcaatttggccccgttgtcgctctcaatcccgcgactcttctgcccttaccagaagagggacttcagcataattgtttggacattctcgcagaggctcatggcactcggccagatctcaccgatcaaccccttcctgatgctgatcatacttggtatactgacggctcatccctgctgcaggaaggccaaagaaaagccggcgccgctgtcacaacagaaactgaagtgatttgggccaaggcactccctgcaggaactagcgcccaaagagccgagctcatcgcccttactcaagctctcaaaatggccgagggcaagaaacttaacgtgtacacagactccaggtacgccttcgccacagcacacattcacggcgagatctatcgccgaaggggatggctgacgagtgagggaaaggaaattaagaacaaggatgaaatactggcgctgctgaaggctctgtttctccctaagcggctgtccattattcactgccctggtcaccagaaagggcattccgctgaagccaggggcaataggatggcagatcaggctgcaaggaaagctgcaattaccgaaacgcccgatacgagcacacttcttatcgagaactcttccccttcaggcggtagcaagcggacagcagatggatccgagtttgaagatatctga

SEQ ID NO: 1608 - DNA, 2634 bp, synthetic construct
  source 1..2634: mol_type = other DNA; note = FH-MCP-MMLV WT
atggactacaaagacgatgacgacaagtacccctatgatgtacctgattatgctgccagcaatttcacacagttcgtccttgtagacaacggcggcaccggggatgttacagtggccccgagcaatttcgcaaacggcgtagccgagtggatctcctctaatagcagaagccaggcttataaggttacatgctctgtaaggcagtcttccgcacaaaatagaaagtacacaatcaaggtcgaagtgcccaaggttgctacacagaccgttggtggagaggagttgccagtggctgggtggcgctcctacctgaatatggagttaacaatccccattttcgctaccaattcagactgtgaactcattgtcaaagctatgcaaggtcttcttaaggatggtaacccaattccaagtgcaattgctgctaattcaggcatttattctggcggcagcagcggcggctcaagcggaagtgaaacacctggaacttccgaaagcgctacgcctgaatcttctggtggatcttctggcggatcttccgcatgcgtcgacactctgaacatcgaggacgaatacaggctccacgaaacttctaaggaacctgacgtgtccttgggatcaacttggttgtccgacttcccccaagcttgggccgagacaggcggaatgggtttggccgtgagacaggccccactcataatcccacttaaggcgacatccactccggtcagtatcaagcagtatccaatgtcccaggaagcacgcttaggaattaaaccacatattcaacgactcctggatcaaggtattctcgtcccatgtcaaagcccttggaatacccctcttctgcctgtgaagaagcccggcacaaacgactaccggcccgtgcaagacctcagggaagtgaataaacgagtcgaggatatacatccgactgtcccgaatccctataatctgctgtcaggtctgccaccaagtcatcaatggtatacagtactggacctgaaagacgcgttcttttgtttgcgactgcatcctacgtctcaaccgctgtttgcattcgaatggcgggaccccgaaatggggatttctgggcagctgacatggactcgtcttcctcaagggtttaagaactcccctacacttttcgacgaagccctgcatcgggatttagctgattttagaatccaacatcctgatctgattctcctgcaatatgttgacgatctgctcctcgctgcaaccagtgaacttgattgtcagcagggaacgagagctttactccagactctgggcaatcttggttaccgtgcttcagctaagaaggctcagatatgtcaaaagcaagtgaaataccttggttacctgttgaaggaagggcaacgctggttaaccgaagctcgcaaggaaacagtaatgggccaacccacacccaaaacaccccgccagctgagagaatttctcggtacagctggattttgcagactgtggattcccggtttcgccgagatggccgcacctctttatccactgacgaagactggtaccctcttcaactggggacccgatcagcagaaagcttaccaggagattaaacaggcactgctgaccgctcccgcgctcggcctgcccgacctgacgaaaccattcgagcttttcgtggatgagaaacaaggatatgctaagggagtgctgactcagaagcttgggccgtggcgacgcccagtagcttatctcagcaagaaactggatcctgtggccgccggttggccgccatgtttgagaatggttgccgctatcgcagtcctcaccaaagacgccggtaaactgacaatggggcaacctctggtgatcctcgctccgcacgctgtggaagccttagtgaagcagccacctgataggtggttaagcaatgcgagaatgacccattaccaagcgttattgctggataccgatagagtgcaatttggccccgttgtcgctctcaatcccgcgactcttctgcccttaccagaagagggacttcagcataattgtttggacattctcgcagaggctcatggcactcggccagatctcaccgatcaaccccttcctgatgctgatcatacttggtatactgacggctcatccctgctgcaggaaggccaaagaaaagccggcgccgctgtcacaacagaaactgaagtgatttgggccaaggcactccctgcaggaactagcgcccaaagagccgagctcatcgcccttactcaagctctcaaaatggccgagggcaagaaacttaacgtgtacacagactccaggtacgccttcgccacagcacacattcacggcgagatctatcgccgaaggggacttctgacgagtgagggaaaggaaattaagaacaaggatgaaatactggcgctgctgaaggctctgtttctccctaagcggctgtccattattcactgccctggtcaccagaaagggcattccgctgaagccaggggcaataggatggcagatcaggctgcaaggaaagctgcaattaccgaaacgcccgatacgagcacacttcttatcgagaactcttccccttcaggcggtagcaagcggacagcagatggatccgagtttgaagatatctga

SEQ ID NO: 1609 - DNA, 1818 bp, synthetic construct
  source 1..1818: mol_type = other DNA; note = FH-MCP-TGIRT
atggactacaaagacgatgacgacaagtacccctatgatgtacctgattatgctgccagcaatttcacacagttcgtccttgtagacaacggcggcaccggggatgttacagtggccccgagcaatttcgcaaacggcgtagccgagtggatctcctctaatagcagaagccaggcttataaggttacatgctctgtaaggcagtcttccgcacaaaatagaaagtacacaatcaaggtcgaagtgcccaaggttgctacacagaccgttggtggagaggagttgccagtggctgggtggcgctcctacctgaatatggagttaacaatccccattttcgctaccaattcagactgtgaactcattgtcaaagctatgcaaggtcttcttaaggatggtaacccaattccaagtgcaattgctgctaattcaggcatttattctggcggcagcagcggcggctcaagcggaagtgaaacacctggaacttccgaaagcgctacgcctgaatcttctggtggatcttctggcggatcttccgcatgcgtcgacgctctgttggaacgcatcctggctcgtgataatttgattactgccctcaagcgtgtggaagctaaccagggtgcacccggaatcgatggtgtatcaacggaccaactgcgcgactatattcgagctcactggtcaaccattcatgcacaattattagccggtacatacagacctgctcctgtgagaagggtggaaattccgaagcctggcggcggcactaggcaactgggcatccccacggttgtcgataggctgatacaacaggccatccttcaggaactcacaccgattttcgatccagatttctcatcaagttctttcgggttccgcccaggacggaacgcacacgatgctgtgcggcaagcccaaggttatatacaagagggctaccgttatgttgtggacatggaccttgagaagttctttgacagagttaatcacgatatactcatgtcacgggtcgccaggaaagttaaagataaaagggtacttaagttaataagagcatacctgcaagccggcgtgatgattgaaggggtgaaggtgcaaaccgaagagggtaccccacagggtggtcccttatcccctctcttagccaatatattgctggatgatcttgacaaggagcttgagaagcgaggcttgaaattttgtcgatacgccgacgattgtaatatctatgtaaaatccctgcgcgcagggcagagagttaaacagtccatccaaagattcctggagaagactttgaaacttaaagtaaacgaagaaaagagtgccgtagaccgcccgtggaagcgtgcttttcttggtttcagcttcacccccgagcgtaaagcccgcattcggttggctcctagatctatacaacggttgaaacaacgaatccgacaattgacaaatcctaattggtccatttctatgcctgagcgtattcatcgcgtcaatcaatatgtgatgggttggattggatattttagacttgtggaaacacccagtgtcttacaaacaatagagggatggatacggcgaagactgagattatgccagtggctgcaatggaagagggtacggacccgaatcagagaattacgcgctctgggactgaaggaaactgcggtaatggagatcgccaacaccaggaaaggtgcgtggagaaccacgaagacaccccaacttcatcaagccttgggcaagacttactggaccgcacaagggctcaaaagcttgactcaacggtactttgaactgagacaaggggatatctga

SEQ ID NO: 1610 - DNA, 4728 bp, synthetic construct
  source 1..4728: mol_type = other DNA; note = FH-MCP-R2Tg
atggactacaaagacgatgacgacaagtacccctatgatgtacctgattatgctgccagcaatttcacacagttcgtccttgtagacaacggcggcaccggggatgttacagtggccccgagcaatttcgcaaacggcgtagccgagtggatctcctctaatagcagaagccaggcttataaggttacatgctctgtaaggcagtcttccgcacaaaatagaaagtacacaatcaaggtcgaagtgcccaaggttgctacacagaccgttggtggagaggagttgccagtggctgggtggcgctcctacctgaatatggagttaacaatccccattttcgctaccaattcagactgtgaactcattgtcaaagctatgcaaggtcttcttaaggatggtaacccaattccaagtgcaattgctgctaattcaggcatttattctggcggcagcagcggcggctcaagcggaagtgaaacacctggaacttccgaaagcgctacgcctgaatcttctggtggatcttctggcggatcttccgcatgcgtcgacgcatcatgtcccaaacctggcccacctgtttcagccggtgcaatgagtcttgaatccgggttgacaactcatagcgtccttgcaatagaacggggccctaattcattagccaactccgggtctgacttcggcggtggcggccttgggctccctttgcggcttttgcgtgtgtccgtagggacacaaaccagtcggagtgattgggtggacctcgtcagctggtcccaccccggacccacatctaaaagtcaacaagtagacctggtatccttgtttcctaaacatagagtcgatctcctctcaaagaacgaccaagtggacttggtggcacaatttcttcccagcaaatttccccctaacttagcagagaacgatttagcgcttctcgttaatttggaattttataggagcgacttgcacgtctatgaatgcgtgcattttgccgcccattgggaaggcctgtcaggattgcccgaggtctatgaacaactggccccacaaccctgcgtaggagaaactctccactccagcctgccccgcgacagtgaacttttcgtgccggaagaaggctcttctgaaaaggaaagtgaagacgcccccaagacgtctccaccgacacccgggaagcatgggctggagcaaactggagaagagaaagtgatggtaaccgtacctgataagaatcccccgtgcccttgctgcggaaccagggtgaatagcgttctcaacctgatagagcatcttaaagtatcacatggaaaacgtggagtgtgcttccgttgtgctaaatgtggtaaggaaaattcaaattaccacagcgtcgtgtgccattttcctaagtgtaggggcccagagacagagaaagctcctgccggggaatggatctgtgaagtctgcaacagggactttaccactaaaatagggctgggccaacacaagcggttggctcacccagcagtcagaaatcaggaaagaatcgtggcgagtcaacctaaagaaaccagcaatcggggcgcacataagcggtgttggaccaaggaagaagaagaacttctcattcgactcgaggcacaatttgaaggcaacaagaatataaacaaactgatcgccgaacacataacaaccaagacagctaaacaaatttcagacaagcgccgacttttatccagaaaacccgcagaggaaccacgagaagaaccagggacatgccatcatacccgccgcgctgccgcaagcttacggactgagccggaaatgtctcatcatgctcaagctgaagaccgcgacaatggccctggccggcgtcctctgcctggtagggcagcagcaggtggacgtacaatggatgaaatcaggagacatcccgataaagggaatggccagcaaaggccgaccaaacagaagagcgaggagcaacttcaagcctactataagaaaacattagaagaacgtctctccgctggcgccctcaatacatttcctagagcttttaaacaagttatggaaggcagagatattaagctggtcattaatcaaaccgcccaggattgttttggctgcctcgaaagcatttcccaaataagaaccgctacccgagacaagaaagacaccgtcacccgagagaagcacccaaagaagcctttccagaaatggatgaaggatagagcgataaagaaaggcaactatctgcgttttcaaagactgttctatttagatcgcggaaagctggcaaagattattctcgacgacatcgaatgccttagctgcgacattccactctctgagatatatagcgtctttaaaacaagatgggaaaccacgggcagctttaagtccctcggggattttaaaacatatggaaaagctgataacaccgcgtttcgagagctgataacggccaaggagattgaaaagaacgtgcaagaaatgtccaagggttccgccccagggccagacggcataactctgggcgacgttgtgaaaatggacccggagttcagtaggacaatggagatctttaacttgtggcttacaactggaaagatacccgatatggtaagaggatgcaggaccgtgctgattcccaagtcaagtaaacccgatcgattaaaggacatcaataactggcgacctattacaattggcagcatactgctgcggctctttagtcgaatcgttactgccagactcagcaaagcgtgtcctctcaacccccgtcaaagaggttttatccgcgctgctggctgcagcgaaaatcttaaactccttcaaacaattatttggtccgccaaacgcgagcatcgcccccttggtgtggtatttgtggatattgcaaaggccttcgacaccgtgtctcaccaacatatcatacacgctctccaacaaagagaagtggacccacatattgtcgggctggtcagcaatatgtatgaaaatattagcacatatattactacaaaacgtaacacacatactgacaaaatccaaatccgcgtgggcgtgaaacagggagatccgatgtcccctctgctgttcaacttagccatggaccctctgctgtgcaagcttgaagaatcaggaaaaggctaccaccgcgggcaatcaagcattactgcgatggcatttgcagatgatctggtccttctcagtgatagctgggaaaatatgaataccaatatttctatcctggaaacattttgcaatctgactgggctcaagacccaaggacagaagtgtcacggattttatataaagccaacaaaggactcatatactatcaatgattgtgctgcgtggaccattaatgggactcctcttaatatgatagatcctggcgagagcgagaaatacctgggcttgcaatttgatccctggataggtatagcccgctctggactctccaccaagctcgacttttggttgcaacggatcgaccaggctccactgaagcctctccagaaaacggacattctgaaaacttataccattcctcgacttatttacatcgcggatcactctgaagtgaaaacagcattgctggagaccttagaccagaagattcgcacagccgtcaaggagtggcttcacctgccgccttgtacttgcgatgccatcctttattcctctacgcgagatggcgggctggggataacgaagctcgctgggttaatccccagtgtgcaagccagacgactccaccgtatcgcccaatccagtgatgatactatgaaatgttttatggaaaaggagaaaatggaacaattgcacaagaagctttggattcaagcaggcggcgatcgagagaatatcccctctatatgggaagccccacccagctctgagccaccaaataatgtgtccactaatagcgaatgggaagcacccacccaaaaggataaattccctaagccctgtaattggcggaagaatgagtttaagaaatggactaagctggcaagtcaaggacgaggaatagtaaatttcgagagggataagatcagtaaccattggattcagtactataggcggattccgcatagaaaacttcttacggcccttcagctccgcgccaacgtctaccctacccgtgaatttcttgctcgaggaaggcaagatcaatatattaaagcctgcagacattgcgatgccgatatagaaagttgtgctcacataatcgggaattgtcctgtcacgcaggatgcgcgcatcaagagacataattacatctgcgagcttctgctcgaggaagcaaagaagaaggattgggtcgtattcaaagagccacacataagagattcaaataaagagctttacaaacctgacttaattttcgtaaaagatgcacgagcattggtagtagacgtgactgtcagatacgaggctgccaaaagctccttggaagaggccgcggctgagaaggtgcgaaaatacaagcaccttgaaacagaagtcagacacctgactaatgcaaaagatgtgaccttcgtcggatttcccctgggagcccggggaaaatggcaccaagacaactttaaattgcttactgaacttgggctttccaagagtcgccaagtgaaaatggcagaaacattctctaccgtcgccctcttttccagcgtggacatcgttcatatgtttgcatctagggcaaggaaatccatggtcatggatatctga

SEQ ID NO: 1611 - DNA, 3918 bp, synthetic construct; identical to SEQ ID NO: 1535
  source 1..3918: mol_type = other DNA; note = FH-MCP-MG140-3

SEQ ID NO: 1612 - DNA, 3918 bp, synthetic construct
  source 1..3918: mol_type = other DNA; note = FH-MCP-MG140-3_D489A
atggactacaaagacgatgacgacaagtacccctatgatgtacctgattatgctgccagcaatttcacacagttcgtccttgtagacaacggcggcaccggggatgttacagtggccccgagcaatttcgcaaacggcgtagccgagtggatctcctctaatagcagaagccaggcttataaggttacatgctctgtaaggcagtcttccgcacaaaatagaaagtacacaatcaaggtcgaagtgcccaaggttgctacacagaccgttggtggagaggagttgccagtggctgggtggcgctcctacctgaatatggagttaacaatccccattttcgctaccaattcagactgtgaactcattgtcaaagctatgcaaggtcttcttaaggatggtaacccaattccaagtgcaattgctgctaattcaggcatttattctggcggcagcagcggcggctcaagcggaagtgaaacacctggaacttccgaaagcgctacgcctgaatcttctggtggatcttctggcggatcttccgcatgcgtcgactcacattctactgctgccgcttcttccggagccgcaactggccctatagtcataagataccctgtaaacaccactaatggcgggacgaccggagaacaagcctgcttctttgctgagtcaagcaactgcgggctggctttcgtggacaataagtcatttgtggaccatctgttgcgggcccataaggcgacacgagatcaaattcaatatatatgttctcattgtcataggcagtttgagaaaatcgaaagcgttcgatcacatcataacatttgcaagcggaaggaagctgttgccccggacttagatgctaggctgccagtggaatgcgaagtggacgggtgttcacgccgctttacgactacgtccgggatgcggctgcacgtgaagaaagcacatccaattgaatatcacgcatctatacctcaatctaaaagaaatttgtggagcgaaggggagatgcggatgctggctcgtatggagctggacaatccgggactgacaaatgcgaggatgaacgaattgctgcatagtcttcatccttccaggtcagttgatgtcatcagacatatgcgcgggagaaacactcgatatagggaaatcatggaagagctcgtgttgattggcgttccagaggatagtgatagccaagccgaaaagacagcagaaccggagccagaaggaagaatcaatgaatgccagctggaagaactggtaaagacgcattcacaaattgatgacgcgcgataccaagccagtattgaatacgtacgtagggtacttcggtctgacgatccaggtgagttcttcaatgactggcttttcagttgcttccctggcaaggaaggccggcggattcagcgtcgaaaacgtgaacggctgcccccacgcaatgcaaaacagaagcgggccgcagaatttcgggtgctgcaggagctgtggcggaaagatcgttcaagacttgcaaccgtcatccttgataagatgccacctacggctaaagaaccgccgattggcgatatagaaaaggtgtatactaccaggttcgaacggcccagtccagaggaccaacatgagtttacgtccaagcctattgaggagcctatggagatggtacggtttatcacagttgaggaagttcttaagaatttaaaagccatgaagtctaacaacgcccccgggttggactctaacataacaatgaagcgtcttcggtccttgccgttgccctgccttcagctcgtctttaattgttggttggccatcggaaaggctccacagagtatgaaacaatgtcggagcaagctgcttcccaaaggggccgaaggtctggatgatgtaaataattggcgtcctttgaccataggctctctcttgatccggttatatacccggatccttgctatgcgcttacagtctaaagtccagctgcatcccagacaaaaggcctttcaacctttggccggatgcggagaaaatatcgcaatagtgtcatctttgctgcaagatgcgcacgaacgcaagaaagaattaaacatcatatttctggacatcgcgaaggcttttgattgcgtgtcacatcacagcattcaacgggcactgaatagatttggcttgccacgcgcttttcgacgtgtgatcgaagatctgtatgatggtgccacaacagtgtttcaaacatcagagggcgatagcaagacccttgggattagctctggagtaaaacaaggttgtcccttgtcccccgtccttttcaatatggtcatggacgaactcatcgctgacgcaccctctacggagtggggctatgagcttcacgacgaatccgtcgggctcctggcatttgctgacgacattgccctggtgagccattctagggcaatgatgtcacacgcgcttgattatgctgcaggcttcttcgaaaagagaaacttacaactgaacgccaggaagtgtattgggcttagtatcaagaaagctccccgccgaaaggttatgcggatcgaaatggggagtatctggagtctccgcaatgggtctgacaacattcccatcaaaatgctttctcccgccgacatggctcgctatcttggagccctgttttccccgtctgggaagcaaacaattgatctcgccactatgaagggctggattacgtccatagaaaagagcagactcaaaccgcaccaaaagttggtgatgctgcgaacgtaccttcttccgagggtactccatcacctcactattggagaaccaaacgcaactaccttgcgtcgggttgagagggaactgcgcaattcagtgaagcggtttctcaaattgcctgtggccactgccacacccttctttcatattagcacaaaagagggtggactcgagttaccacctttgctcgagaccatagcaaaacgaaaactgaagtgggaaataaggttacagaaatcaaaggattccttgattcgagccgtcgctgactctccaaaattccgtaaacaatttgacaaagctcgggcctggattggagtgccggtgattaatcgaccaagtgacatcaataggcgaatccgagagctgaataacggcaggtttgaaaggttcacgtctgagctggctgtccaatcccggtgtcatagggctctggccagcaatcccttgcgaaatgattggctgaccggacacaaccccgggctttacgcatcacaatttatagacgcattgaaacttgtcactagccaactgcccacccgcgaagcactgaatcggggaaacccccaggccgataaaaggtgtcggggctgtggattctccgtagagaatcaaaagcacgtcatcagtaattgtcccctggtccaacaagagcgtcatctgcgccataatcgtgtcgcccagctgtttgctcgttacgccaaagagaaaggatggaatattatagcagaacctcggatcaggaatcccagcggcgaaatcatgcgtccggacatcgttctgcggcgagatgataacgtagctatcgtagacatccaaatcccttatgaagacggcggtcgcgaacaattggctgaacgatatagacaaaagtgcagcaaatatcggcagttaagcacccacattcagcatgtgctgggagttaccaatcataccattggtgcgattattgttggtgcttgtggcacatggtgcgagcttaacaatcccatcttggattacataggagtcaatactacagccataaagaagaatctcagcattgaagctttgaggggcacactgaaaatattcggccaatttaagaatagggtgtttagaaatgagagagtgcatccatcacagcggccaagctccggcccaccagtaccagatatctaa

SEQ ID NO: 1613 - DNA, 3918 bp, synthetic construct
  source 1..3918: mol_type = other DNA; note = FH-MCP-MG140-3_L698A
atggactacaaagacgatgacgacaagtacccctatgatgtacctgattatgctgccagcaatttcacacagttcgtccttgtagacaacggcggcaccggggatgttacagtggccccgagcaatttcgcaaacggcgtagccgagtggatctcctctaatagcagaagccaggcttataaggttacatgctctgtaaggcagtcttccgcacaaaatagaaagtacacaatcaaggtcgaagtgcccaaggttgctacacagaccgttggtggagaggagttgccagtggctgggtggcgctcctacctgaatatggagttaacaatccccattttcgctaccaattcagactgtgaactcattgtcaaagctatgcaaggtcttcttaaggatggtaacccaattccaagtgcaattgctgctaattcaggcatttattctggcggcagcagcggcggctcaagcggaagtgaaacacctggaacttccgaaagcgctacgcctgaatcttctggtggatcttctggcggatcttccgcatgcgtcgactcacattctactgctgccgcttcttccggagccgcaactggccctatagtcataagataccctgtaaacaccactaatggcgggacgaccggagaacaagcctgcttctttgctgagtcaagcaactgcgggctggctttcgtggacaataagtcatttgtggaccatctgttgcgggcccataaggcgacacgagatcaaattcaatatatatgttctcattgtcataggcagtttgagaaaatcgaaagcgttcgatcacatcataacatttgcaagcggaaggaagctgttgccccggacttagatgctaggctgccagtggaatgcgaagtggacgggtgttcacgccgctttacgactacgtccgggatgcggctgcacgtgaagaaagcacatccaattgaatatcacgcatctatacctcaatctaaaagaaatttgtggagcgaaggggagatgcggatgctggctcgtatggagctggacaatccgggactgacaaatgcgaggatgaacgaattgctgcatagtcttcatccttccaggtcagttgatgtcatcagacatatgcgcgggagaaacactcgatatagggaaatcatggaagagctcgtgttgattggcgttccagaggatagtgatagccaagccgaaaagacagcagaaccggagccagaaggaagaatcaatgaatgccagctggaagaactggtaaagacgcattcacaaattgatgacgcgcgataccaagccagtattgaatacgtacgtagggtacttcggtctgacgatccaggtgagttcttcaatgactggcttttcagttgcttccctggcaaggaaggccggcggattcagcgtcgaaaacgtgaacggctgcccccacgcaatgcaaaacagaagcgggccgcagaatttcgggtgctgcaggagctgtggcggaaagatcgttcaagacttgcaaccgtcatccttgataagatgccacctacggctaaagaaccgccgattggcgatatagaaaaggtgtatactaccaggttcgaacggcccagtccagaggaccaacatgagtttacgtccaagcctattgaggagcctatggagatggtacggtttatcacagttgaggaagttcttaagaatttaaaagccatgaagtctaacaacgcccccgggttggactctaacataacaatgaagcgtcttcggtccttgccgttgccctgccttcagctcgtctttaattgttggttggccatcggaaaggctccacagagtatgaaacaatgtcggagcaagctgcttcccaaaggggccgaaggtctggatgatgtaaataattggcgtcctttgaccataggctctctcttgatccggttatatacccggatccttgctatgcgcttacagtctaaagtccagctgcatcccagacaaaaggcctttcaacctttggacggatgcggagaaaatatcgcaatagtgtcatctttgctgcaagatgcgcacgaacgcaagaaagaattaaacatcatatttctggacatcgcgaaggcttttgattgcgtgtcacatcacagcattcaacgggcactgaatagatttggcttgccacgcgcttttcgacgtgtgatcgaagatctgtatgatggtgccacaacagtgtttcaaacatcagagggcgatagcaagacccttgggattagctctggagtaaaacaaggttgtcccttgtcccccgtccttttcaatatggtcatggacgaactcatcgctgacgcaccctctacggagtggggctatgagcttcacgacgaatccgtcgggctcctggcatttgctgacgacattgccctggtgagccattctagggcaatgatgtcacacgcgcttgattatgctgcaggcttcttcgaaaagagaaacttacaactgaacgccaggaagtgtattgggcttagtatcaagaaagctccccgccgaaaggttatgcggatcgaaatggggagtatctggagtctccgcaatgggtctgacaacattcccatcaaaatgctttctcccgccgacatggctcgctatgccggagccctgttttccccgtctgggaagcaaacaattgatctcgccactatgaagggctggattacgtccatagaaaagagcagactcaaaccgcaccaaaagttggtgatgctgcgaacgtaccttcttccgagggtactccatcacctcactattggagaaccaaacgcaactaccttgcgtcgggttgagagggaactgcgcaattcagtgaagcggtttctcaaattgcctgtggccactgccacacccttctttcatattagcacaaaagagggtggactcgagttaccacctttgctcgagaccatagcaaaacgaaaactgaagtgggaaataaggttacagaaatcaaaggattccttgattcgagccgtcgctgactctccaaaattccgtaaacaatttgacaaagctcgggcctggattggagtgccggtgattaatcgaccaagtgacatcaataggcgaatccgagagctgaataacggcaggtttgaaaggttcacgtctgagctggctgtccaatcccggtgtcatagggctctggccagcaatcccttgcgaaatgattggctgaccggacacaaccccgggctttacgcatcacaatttatagacgcattgaaacttgtcactagccaactgcccacccgcgaagcactgaatcggggaaacccccaggccgataaaaggtgtcggggctgtggattctccgtagagaatcaaaagcacgtcatcagtaattgtcccctggtccaacaagagcgtcatctgcgccataatcgtgtcgcccagctgtttgctcgttacgccaaagagaaaggatggaatattatagcagaacctcggatcaggaatcccagcggcgaaatcatgcgtccggacatcgttctgcggcgagatgataacgtagctatcgtagacatccaaatcccttatgaagacggcggtcgcgaacaattggctgaacgatatagacaaaagtgcagcaaatatcggcagttaagcacccacattcagcatgtgctgggagttaccaatcataccattggtgcgattattgttggtgcttgtggcacatggtgcgagcttaacaatcccatcttggattacataggagtcaatactacagccataaagaagaatctcagcattgaagctttgaggggcacactgaaaatattcggccaatttaagaatagggtgtttagaaatgagagagtgcatccatcacagcggccaagctccggcccaccagtaccagatatctaa

SEQ ID NO: 1614 - DNA, 3918 bp, synthetic construct
  source 1..3918: mol_type = other DNA; note = FH-MCP-MG140-3_F702A
atggactacaaagacgatgacgacaagtacccctatgatgtacctgattatgctgccagcaatttcacacagttcgtccttgtagacaacggcggcaccggggatgttacagtggccccgagcaatttcgcaaacggcgtagccgagtggatctcctctaatagcagaagccaggcttataaggttacatgctctgtaaggcagtcttccgcacaaaatagaaagtacacaatcaaggtcgaagtgcccaaggttgctacacagaccgttggtggagaggagttgccagtggctgggtggcgctcctacctgaatatggagttaacaatccccattttcgctaccaattcagactgtgaactcattgtcaaagctatgcaaggtcttcttaaggatggtaacccaattccaagtgcaattgctgctaattcaggcatttattctggcggcagcagcggcggctcaagcggaagtgaaacacctggaacttccgaaagcgctacgcctgaatcttctggtggatcttctggcggatcttccgcatgcgtcgactcacattctactgctgccgcttcttccggagccgcaactggccctatagtcataagataccctgtaaacaccactaatggcgggacgaccggagaacaagcctgcttctttgctgagtcaagcaactgcgggctggctttcgtggacaataagtcatttgtggaccatctgttgcgggcccataaggcgacacgagatcaaattcaatatatatgttctcattgtcataggcagtttgagaaaatcgaaagcgttcgatcacatcataacatttgcaagcggaaggaagctgttgccccggacttagatgctaggctgccagtggaatgcgaagtggacgggtgttcacgccgctttacgactacgtccgggatgcggctgcacgtgaagaaagcacatccaattgaatatcacgcatctatacctcaatctaaaagaaatttgtggagcgaaggggagatgcggatgctggctcgtatggagctggacaatccgggactgacaaatgcgaggatgaacgaattgctgcatagtcttcatccttccaggtcagttgatgtcatcagacatatgcgcgggagaaacactcgatatagggaaatcatggaagagctcgtgttgattggcgttccagaggatagtgatagccaagccgaaaagacagcagaaccggagccagaaggaagaatcaatgaatgccagctggaagaactggtaaagacgcattcacaaattgatgacgcgcgataccaagccagtattgaatacgtacgtagggtacttcggtctgacgatccaggtgagttcttcaatgactggcttttcagttgcttccctggcaaggaaggccggcggattcagcgtcgaaaacgtgaacggctgcccccacgcaatgcaaaacagaagcgggccgcagaatttcgggtgctgcaggagctgtggcggaaagatcgttcaagacttgcaaccgtcatccttgataagatgccacctacggctaaagaaccgccgattggcgatatagaaaaggtgtatactaccaggttcgaacggcccagtccagaggaccaacatgagtttacgtccaagcctattgaggagcctatggagatggtacggtttatcacagttgaggaagttcttaagaatttaaaagccatgaagtctaacaacgcccccgggttggactctaacataacaatgaagcgtcttcggtccttgccgttgccctgccttcagctcgtctttaattgttggttggccatcggaaaggctccacagagtatgaaacaatgtcggagcaagctgcttcccaaaggggccgaaggtctggatgatgtaaataattggcgtcctttgaccataggctctctcttgatccggttatatacccggatccttgctatgcgcttacagtctaaagtccagctgcatcccagacaaaaggcctttcaacctttggacggatgcggagaaaatatcgcaatagtgtcatctttgctgcaagatgcgcacgaacgcaagaaagaattaaacatcatatttctggacatcgcgaaggcttttgattgcgtgtcacatcacagcattcaacgggcactgaatagatttggcttgccacgcgcttttcgacgtgtgatcgaagatctgtatgatggtgccacaacagtgtttcaaacatcagagggcgatagcaagacccttgggattagctctggagtaaaacaaggttgtcccttgtcccccgtccttttcaatatggtcatggacgaactcatcgctgacgcaccctctacggagtggggctatgagcttcacgacgaatccgtcgggctcctggcatttgctgacgacattgccctggtgagccattctagggcaatgatgtcacacgcgcttgattatgctgcaggcttcttcgaaaagagaaacttacaactgaacgccaggaagtgtattgggcttagtatcaagaaagctccccgccgaaaggttatgcggatcgaaatggggagtatctggagtctccgcaatgggtctgacaacattcccatcaaaatgctttctcccgccgacatggctcgctatcttggagccctggcctccccgtctgggaagcaaacaattgatctcgccactatgaagggctggattacgtccatagaaaagagcagactcaaaccgcaccaaaagttggtgatgctgcgaacgtaccttcttccgagggtactccatcacctcactattggagaaccaaacgcaactaccttgcgtcgggttgagagggaactgcgcaattcagtgaagcggtttctcaaattgcctgtggccactgccacacccttctttcatattagcacaaaagagggtggactcgagttaccacctttgctcgagaccatagcaaaacgaaaactgaagtgggaaataaggttacagaaatcaaaggattccttgattcgagccgtcgctgactctccaaaattccgtaaacaatttgacaaagctcgggcctggattggagtgccggtgattaatcgaccaagtgacatcaataggcgaatccgagagctgaataacggcaggtttgaaaggttcacgtctgagctggctgtccaatcccggtgtcatagggctctggccagcaatcccttgcgaaatgattggctgaccggacacaaccccgggctttacgcatcacaatttatagacgcattgaaacttgtcactagccaactgcccacccgcgaagcactgaatcggggaaacccccaggccgataaaaggtgtcggggctgtggattctccgtagagaatcaaaagcacgtcatcagtaattgtcccctggtccaacaagagcgtcatctgcgccataatcgtgtcgcccagctgtttgctcgttacgccaaagagaaaggatggaatattatagcagaacctcggatcaggaatcccagcggcgaaatcatgcgtccggacatcgttctgcggcgagatgataacgtagctatcgtagacatccaaatcccttatgaagacggcggtcgcgaacaattggctgaacgatatagacaaaagtgcagcaaatatcggcagttaagcacccacattcagcatgtgctgggagttaccaatcataccattggtgcgattattgttggtgcttgtggcacatggtgcgagcttaacaatcccatcttggattacataggagtcaatactacagccataaagaagaatctcagcattgaagctttgaggggcacactgaaaatattcggccaatttaagaatagggtgtttagaaatgagagagtgcatccatcacagcggccaagctccggcccaccagtaccagatatctaa

SEQ ID NO: 1615 - DNA, 3918 bp, synthetic construct
  source 1..3918: mol_type = other DNA; note = FH-MCP-MG140-3_L748A
atggactacaaagacgatgacgacaagtacccctatgatgtacctgattatgctgccagcaatttcacacagttcgtccttgtagacaacggcggcaccggggatgttacagtggccccgagcaatttcgcaaacggcgtagccgagtggatctcctctaatagcagaagccaggcttataaggttacatgctctgtaaggcagtcttccgcacaaaatagaaagtacacaatcaaggtcgaagtgcccaaggttgctacacagaccgttggtggagaggagttgccagtggctgggtggcgctcctacctgaatatggagttaacaatccccattttcgctaccaattcagactgtgaactcattgtcaaagctatgcaaggtcttcttaaggatggtaacccaattccaagtgcaattgctgctaattcaggcatttattctggcggcagcagcggcggctcaagcggaagtgaaacacctggaacttccgaaagcgctacgcctgaatcttctggtggatcttctggcggatcttccgcatgcgtcgactcacattctactgctgccgcttcttccggagccgcaactggccctatagtcataagataccctgtaaacaccactaatggcgggacgaccggagaacaagcctgcttctttgctgagtcaagcaactgcgggctggctttcgtggacaataagtcatttgtggaccatctgttgcgggcccataaggcgacacgagatcaaattcaatatatatgttctcattgtcataggcagtttgagaaaatcgaaagcgttcgatcacatcataacatttgcaagcggaaggaagctgttgccccggacttagatgctaggctgccagtggaatgcgaagtggacgggtgttcacgccgctttacgactacgtccgggatgcggctgcacgtgaagaaagcacatccaattgaatatcacgcatctatacctcaatctaaaagaaatttgtggagcgaaggggagatgcggatgctggctcgtatggagctggacaatccgggactgacaaatgcgaggatgaacgaattgctgcatagtcttcatccttccaggtcagttgatgtcatcagacatatgcgcgggagaaacactcgatatagggaaatcatggaagagctcgtgttgattggcgttccagaggatagtgatagccaagccgaaaagacagcagaaccggagccagaaggaagaatcaatgaatgccagctggaagaactggtaaagacgcattcacaaattgatgacgcgcgataccaagccagtattgaatacgtacgtagggtacttcggtctgacgatccaggtgagttcttcaatgactggcttttcagttgcttccctggcaaggaaggccggcggattcagcgtcgaaaacgtgaacggctgcccccacgcaatgcaaaacagaagcgggccgcagaatttcgggtgctgcaggagctgtggcggaaagatcgttcaagacttgcaaccgtcatccttgataagatgccacctacggctaaagaaccgccgattggcgatatagaaaaggtgtatactaccaggttcgaacggcccagtccagaggaccaacatgagtttacgtccaagcctattgaggagcctatggagatggtacggtttatcacagttgaggaagttcttaagaatttaaaagccatgaagtctaacaacgcccccgggttggactctaacataacaatgaagcgtcttcggtccttgccgttgccctgccttcagctcgtctttaattgttggttggccatcggaaaggctccacagagtatgaaacaatgtcggagcaagctgcttcccaaaggggccgaaggtctggatgatgtaaataattggcgtcctttgaccataggctctctcttgatccggttatatacccggatccttgctatgcgcttacagtctaaagtccagctgcatcccagacaaaaggcctttcaacctttggacggatgcggagaaaatatcgcaatagtgtcatctttgctgcaagatgcgcacgaacgcaagaaagaattaaacatcatatttctggacatcgcgaaggcttttgattgcgtgtcacatcacagcattcaacgggcactgaatagatttggcttgccacgcgcttttcgacgtgtgatcgaagatctgtatgatggtgccacaacagtgtttcaaacatcagagggcgatagcaagacccttgggattagctctggagtaaaacaaggttgtcccttgtcccccgtccttttcaatatggtcatggacgaactcatcgctgacgcaccctctacggagtggggctatgagcttcacgacgaatccgtcgggctcctggcatttgctgacgacattgccctggtgagccattctagggcaatgatgtcacacgcgcttgattatgctgcaggcttcttcgaaaagagaaacttacaactgaacgccaggaagtgtattgggcttagtatcaagaaagctccccgccgaaaggttatgcggatcgaaatggggagtatctggagtctccgcaatgggtctgacaacattcccatcaaaatgctttctcccgccgacatggctcgctatcttggagccctgttttccccgtctgggaagcaaacaattgatctcgccactatgaagggctggattacgtccatagaaaagagcagactcaaaccgcaccaaaagttggtgatgctgcgaacgtaccttcttccgagggtactccatcacgccactattggagaaccaaacgcaactaccttgcgtcgggttgagagggaactgcgcaattcagtgaagcggtttctcaaattgcctgtggccactgccacacccttctttcatattagcacaaaagagggtggactcgagttaccacctttgctcgagaccatagcaaaacgaaaactgaagtgggaaataaggttacagaaatcaaaggattccttgattcgagccgtcgctgactctccaaaattccgtaaacaatttgacaaagctcgggcctggattggagtgccggtgattaatcgaccaagtgacatcaataggcgaatccgagagctgaataacggcaggtttgaaaggttcacgtctgagctggctgtccaatcccggtgtcatagggctctggccagcaatcccttgcgaaatgattggctgaccggacacaaccccgggctttacgcatcacaatttatagacgcattgaaacttgtcactagccaactgcccacccgcgaagcactgaatcggggaaacccccaggccgataaaaggtgtcggggctgtggattctccgtagagaatcaaaagcacgtcatcagtaattgtcccctggtccaacaagagcgtcatctgcgccataatcgtgtcgcccagctgtttgctcgttacgccaaagagaaaggatggaatattatagcagaacctcggatcaggaatcccagcggcgaaatcatgcgtccggacatcgttctgcggcgagatgataacgtagctatcgtagacatccaaatcccttatgaagacggcggtcgcgaacaattggctgaacgatatagacaaaagtgcagcaaatatcggcagttaagcacccacattcagcatgtgctgggagttaccaatcataccattggtgcgattattgttggtgcttgtggcacatggtgcgagcttaacaatcccatcttggattacataggagtcaatactacagccataaagaagaatctcagcattgaagctttgaggggcacactgaaaatattcggccaatttaagaatagggtgtttagaaatgagagagtgcatccatcacagcggccaagctccggcccaccagtaccagatatctaa

SEQ ID NO: 1616 - DNA, 3918 bp, synthetic construct
  source 1..3918: mol_type = other DNA; note = FH-MCP-MG140-3_L765A
atggactacaaagacgatgacgacaagtacccctatgatgtacctgattatgctgccagcaatttcacacagttcgtccttgtagacaacggcggcaccggggatgttacagtggccccgagcaatttcgcaaacggcgtagccgagtggatctcctctaatagcagaagccaggcttataaggttacatgctctgtaaggcagtcttccgcacaaaatagaaagtacacaatcaaggtcgaagtgcccaaggttgctacacagaccgttggtggagaggagttgccagtggctgggtggcgctcctacctgaatatggagttaacaatccccattttcgctaccaattcagactgtgaactcattgtcaaagctatgcaaggtcttcttaaggatggtaacccaattccaagtgcaattgctgctaattcaggcatttattctggcggcagcagcggcggctcaagcggaagtgaaacacctggaacttccgaaagcgctacgcctgaatcttctggtggatcttctggcggatcttccgcatgcgtcgactcacattctactgctgccgcttcttccggagccgcaactggccctatagtcataagataccctgtaaacaccactaatggcgggacgaccggagaacaagcctgcttctttgctgagtcaagcaactgcgggctggctttcgtggacaataagtcatttgtggaccatctgttgcgggcccataaggcgacacgagatcaaattcaatatatatgttctcattgtcataggcagtttgagaaaatcgaaagcgttcgatcacatcataacatttgcaagcggaaggaagctgttgccccggacttagatgctaggctgccagtggaatgcgaagtggacgggtgttcacgccgctttacgactacgtccgggatgcggctgcacgtgaagaaagcacatccaattgaatatcacgcatctatacctcaatctaaaagaaatttgtggagcgaaggggagatgcggatgctggctcgtatggagctggacaatccgggactgacaaatgcgaggatgaacgaattgctgcatagtcttcatccttccaggtcagttgatgtcatcagacatatgcgcgggagaaacactcgatatagggaaatcatggaagagctcgtgttgattggcgttccagaggatagtgatagccaagccgaaaagacagcagaaccggagccagaaggaagaatcaatgaatgccagctggaagaactggtaaagacgcattcacaaattgatgacgcgcgataccaagccagtattgaatacgtacgtagggtacttcggtctgacgatccaggtgagttcttcaatgactggcttttcagttgcttccctggcaaggaaggccggcggattcagcgtcgaaaacgtgaacggctgcccccacgcaatgcaaaacagaagcgggccgcagaatttcgggtgctgcaggagctgtggcggaaagatcgttcaagacttgcaaccgtcatccttgataagatgccacctacggctaaagaaccgccgattggcgatatagaaaaggtgtatactaccaggttcgaacggcccagtccagaggaccaacatgagtttacgtccaagcctattgaggagcctatggagatggtacggtttatcacagttgaggaagttcttaagaatttaaaagccatgaagtctaacaacgcccccgggttggactctaacataacaatgaagcgtcttcggtccttgccgttgccctgccttcagctcgtctttaattgttggttggccatcggaaaggctccacagagtatgaaacaatgtcggagcaagctgcttcccaaaggggccgaaggtctggatgatgtaaataattggcgtcctttgaccataggctctctcttgatccggttatatacccggatccttgctatgcgcttacagtctaaagtccagctgcatcccagacaaaaggcctttcaacctttggacggatgcggagaaaatatcgcaatagtgtcatctttgctgcaagatgcgcacgaacgcaagaaagaattaaacatcatatttctggacatcgcgaaggcttttgattgcgtgtcacatcacagcattcaacgggcactgaatagatttggcttgccacgcgcttttcgacgtgtgatcgaagatctgtatgatggtgccacaacagtgtttcaaacatcagagggcgatagcaagacccttgggattagctctggagtaaaacaaggttgtcccttgtcccccgtccttttcaatatggtcatggacgaactcatcgctgacgcaccctctacggagtggggctatgagcttcacgacgaatccgtcgggctcctggcatttgctgacgacattgccctggtgagccattctagggcaatgatgtcacacgcgcttgattatgctgcaggcttcttcgaaaagagaaacttacaactgaacgccaggaagtgtattgggcttagtatcaagaaagctccccgccgaaaggttatgcggatcgaaatggggagtatctggagtctccgcaatgggtctgacaacattcccatcaaaatgctttctcccgccgacatggctcgctatcttggagccctgttttccccgtctgggaagcaaacaattgatctcgccactatgaagggctggattacgtccatagaaaagagcagactcaaaccgcaccaaaagttggtgatgctgcgaacgtaccttcttccgagggtactccatcacctcactattggagaaccaaacgcaactaccttgcgtcgggttgagagggaagcccgcaattcagtgaagcggtttctcaaattgcctgtggccactgccacacccttctttcatattagcacaaaagagggtggactcgagttaccacctttgctcgagaccatagcaaaacgaaaactgaagtgggaaataaggttacagaaatcaaaggattccttgattcgagccgtcgctgactctccaaaattccgtaaacaatttgacaaagctcgggcctggattggagtgccggtgattaatcgaccaagtgacatcaataggcgaatccgagagctgaataacggcaggtttgaaaggttcacgtctgagctggctgtccaatcccggtgtcatagggctctggccagcaatcccttgcgaaatgattggctgaccggacacaaccccgggctttacgcatcacaatttatagacgcattgaaacttgtcactagccaactgcccacccgcgaagcactgaatcggggaaacccccaggccgataaaaggtgtcggggctgtggattctccgtagagaatcaaaagcacgtcatcagtaattgtcccctggtccaacaagagcgtcatctgcgccataatcgtgtcgcccagctgtttgctcgttacgccaaagagaaaggatggaatattatagcagaacctcggatcaggaatcccagcggcgaaatcatgcgtccggacatcgttctgcggcgagatgataacgtagctatcgtagacatccaaatcccttatgaagacggcggtcgcgaacaattggctgaacgatatagacaaaagtgcagcaaatatcggcagttaagcacccacattcagcatgtgctgggagttaccaatcataccattggtgcgattattgttggtgcttgtggcacatggtgcgagcttaacaatcccatcttggattacataggagtcaatactacagccataaagaagaatctcagcattgaagctttgaggggcacactgaaaatattcggccaatttaagaatagggtgtttagaaatgagagagtgcatccatcacagcggccaagctccggcccaccagtaccagatatctaa

SEQ ID NO: 1617 - DNA, 3918 bp, synthetic construct
  source 1..3918: mol_type = other DNA; note = FH-MCP-MG140-3_Pentamutant
atggactacaaagacgatgacgacaagtacccctatgatgtacctgattatgctgccagcaatttcacacagttcgtccttgtagacaacggcggcaccggggatgttacagtggccccgagcaatttcgcaaacggcgtagccgagtggatctcctctaatagcagaagccaggcttataaggttacatgctctgtaaggcagtcttccgcacaaaatagaaagtacacaatcaaggtcgaagtgcccaaggttgctacacagaccgttggtggagaggagttgccagtggctgggtggcgctcctacctgaatatggagttaacaatccccattttcgctaccaattcagactgtgaactcattgtcaaagctatgcaaggtcttcttaaggatggtaacccaattccaagtgcaattgctgctaattcaggcatttattctggcggcagcagcggcggctcaagcggaagtgaaacacctggaacttccgaaagcgctacgcctgaatcttctggtggatcttctggcggatcttccgcatgcgtcgactcacattctactgctgccgcttcttccggagccgcaactggccctatagtcataagataccctgtaaacaccactaatggcgggacgaccggagaacaagcctgcttctttgctgagtcaagcaactgcgggctggctttcgtggacaataagtcatttgtggaccatctgttgcgggcccataaggcgacacgagatcaaattcaatatatatgttctcattgtcataggcagtttgagaaaatcgaaagcgttcgatcacatcataacatttgcaagcggaaggaagctgttgccccggacttagatgctaggctgccagtggaatgcgaagtggacgggtgttcacgccgctttacgactacgtccgggatgcggctgcacgtgaagaaagcacatccaattgaatatcacgcatctatacctcaatctaaaagaaatttgtggagcgaaggggagatgcggatgctggctcgtatggagctggacaatccgggactgacaaatgcgaggatgaacgaattgctgcatagtcttcatccttccaggtcagttgatgtcatcagacatatgcgcgggagaaacactcgatatagggaaatcatggaagagctcgtgttgattggcgttccagaggatagtgatagccaagccgaaaagacagcagaaccggagccagaaggaagaatcaatgaatgccagctggaagaactggtaaagacgcattcacaaattgatgacgcgcgataccaagccagtattgaatacgtacgtagggtacttcggtctgacgatccaggtgagttcttcaatgactggcttttcagttgcttccctggcaaggaaggccggcggattcagcgtcgaaaacgtgaacggctgcccccacgcaatgcaaaacagaagcgggccgcagaatttcgggtgctgcaggagctgtggcggaaagatcgttcaagacttgcaaccgtcatccttgataagatgccacctacggctaaagaaccgccgattggcgatatagaaaaggtgtatactaccaggttcgaacggcccagtccagaggaccaacatgagtttacgtccaagcctattgaggagcctatggagatggtacggtttatcacagttgaggaagttcttaagaatttaaaagccatgaagtctaacaacgcccccgggttggactctaacataacaatgaagcgtcttcggtccttgccgttgccctgccttcagctcgtctttaattgttggttggccatcggaaaggctccacagagtatgaaacaatgtcggagcaagctgcttcccaaaggggccgaaggtctggatgatgtaaataattggcgtcctttgaccataggctctctcttgatccggttatatacccggatccttgctatgcgcttacagtctaaagtccagctgcatcccagacaaaaggcctttcaacctttggccggatgcggagaaaatatcgcaatagtgtcatctttgctgcaagatgcgcacgaacgcaagaaagaattaaacatcatatttctggacatcgcgaaggcttttgattgcgtgtcacatcacagcattcaacgggcactgaatagatttggcttgccacgcgcttttcgacgtgtgatcgaagatctgtatgatggtgccacaacagtgtttcaaacatcagagggcgatagcaagacccttgggattagctctggagtaaaacaaggttgtcccttgtcccccgtccttttcaatatggtcatggacgaactcatcgctgacgcaccctctacggagtggggctatgagcttcacgacgaatccgtcgggctcctggcatttgctgacgacattgccctggtgagccattctagggcaatgatgtcacacgcgcttgattatgctgcaggcttcttcgaaaagagaaacttacaactgaacgccaggaagtgtattgggcttagtatcaagaaagctccccgccgaaaggttatgcggatcgaaatggggagtatctggagtctccgcaatgggtctgacaacattcccatcaaaatgctttctcccgccgacatggctcgctatgccggagccctggcctccccgtctgggaagcaaacaattgatctcgccactatgaagggctggattacgtccatagaaaagagcagactcaaaccgcaccaaaagttggtgatgctgcgaacgtaccttcttccgagggtactccatcacgccactattggagaaccaaacgcaactaccttgcgtcgggttgagagggaagcccgcaattcagtgaagcggtttctcaaattgcctgtggccactgccacacccttctttcatattagcacaaaagagggtggactcgagttaccacctttgctcgagaccatagcaaaacgaaaactgaagtgggaaataaggttacagaaatcaaaggattccttgattcgagccgtcgctgactctccaaaattccgtaaacaatttgacaaagctcgggcctggattggagtgccggtgattaatcgaccaagtgacatcaataggcgaatccgagagctgaataacggcaggtttgaaaggttcacgtctgagctggctgtccaatcccggtgtcatagggctctggccagcaatcccttgcgaaatgattggctgaccggacacaaccccgggctttacgcatcacaatttatagacgcattgaaacttgtcactagccaactgcccacccgcgaagcactgaatcggggaaacccccaggccgataaaaggtgtcggggctgtggattctccgtagagaatcaaaagcacgtcatcagtaattgtcccctggtccaacaagagcgtcatctgcgccataatcgtgtcgcccagctgtttgctcgttacgccaaagagaaaggatggaatattatagcagaacctcggatcaggaatcccagcggcgaaatcatgcgtccggacatcgttctgcggcgagatgataacgtagctatcgtagacatccaaatcccttatgaagacggcggtcgcgaacaattggctgaacgatatagacaaaagtgcagcaaatatcggcagttaagcacccacattcagcatgtgctgggagttaccaatcataccattggtgcgattattgttggtgcttgtggcacatggtgcgagcttaacaatcccatcttggattacataggagtcaatactacagccataaagaagaatctcagcattgaagctttgaggggcacactgaaaatattcggccaatttaagaatagggtgtttagaaatgagagagtgcatccatcacagcggccaagctccggcccaccagtaccagatatctaa

SEQ ID NO: 1618 - DNA, 3726 bp, synthetic construct; identical to SEQ ID NO: 1536
  source 1..3726: mol_type = other DNA; note = FH-MCP-MG140-8

SEQ ID NO: 1619 - DNA, 3726 bp, synthetic construct
  source 1..3726: mol_type = other DNA; note = FH-MCP-MG140-8_D451A
atggactacaaagacgatgacgacaagtacccctatgatgtacctgattatgctgccagcaatttcacacagttcgtccttgtagacaacggcggcaccggggatgttacagtggccccgagcaatttcgcaaacggcgtagccgagtggatctcctctaatagcagaagccaggcttataaggttacatgctctgtaaggcagtcttccgcacaaaatagaaagtacacaatcaaggtcgaagtgcccaaggttgctacacagaccgttggtggagaggagttgccagtggctgggtggcgctcctacctgaatatggagttaacaatccccattttcgctaccaattcagactgtgaactcattgtcaaagctatgcaaggtcttcttaaggatggtaacccaattccaagtgcaattgctgctaattcaggcatttattctggcggcagcagcggcggctcaagcggaagtgaaacacctggaacttccgaaagcgctacgcctgaatcttctggtggatcttctggcggatcttccgcatgcgtcgactacccaaccagtgccgaagtgcctcaaccctgccccgtatgtctgagctctttgatagatcctaaacagattagagatcactttcggaagaagcatcatggcgtgcttatgcactggacctgccggaagtgcggcaggttttggccaaataacaaaagtgctgcatctcactataggtattgtattaaaagtcttccgagtctcgaggggcctagcaaatcacacaagtgcatcgaatgcggcggatccttttcaaccctggcaggccttcaactccacaggaaacggaagcaccctgaagcctacaatgagtctctcccccggcccactgggaagaatcggccatggggagatgacgagctgaagcggctggcggccgtggagctcgatagcggcggtacaaagcatattaacattaaatgccaaaagcatctccctcataggacaatcgaggcaatcgcatctattcgcaagactgatcgctatcgcattatcttaagggaaatccggtctagccgatctataagccgagagacccgcgaggaagcaactacgtcaacacctgacagcagcaacgtgctggaacggttaacatcccgaatcgcagagctgaagtctggagattacagcccatccgtcgaagccattctcgcttataccgaacgctgcctcgaggatcgcaatgcaagtagtggtctgagcctgctgccttctgagatgtatatgcccaaacccacttccgcttcaaagataaacagaggtatgcgcacgcccttccggcctcaaaatcgaacgcagagaagacgtcaacattatcaacaggtccaattgctgtacaaacgcgatcggaaacaggcagctggcgtgatcttggacggatccccgctgcacgtcgtgcaaccggacgtggagaaggtagatgaaatctttagatcaagattttcccgaccttctccaccggatgacgcagagttcatttccagtcctgccggtgtcttaaatatggattatataactgcaggagagattcaacaatgtagggacagcatgaagaagaataacgcacccggtccagaccgcaacattacaatggacgtcctcttggcactggaactcccagtcctggagctgttgtttaacacgtggttagcccttaaacaggtacctgctgcatttaagacggctaggacaatactgatacccaagagcggcgatacctcagacccgaataattggcggcccattacaatatgtagcctcatctcaagactctacgccaaactgttagcctcaagattgtccaaatgtgccaacttatcagaaagacagaaggcttttcgacctgtcgccggttgcggcgagaatacagccatcctttcagccgttatcgctcaagctcgtaaaaccaagagtcaactgcatgtagtgttcttagatctggcaaaagcttttgatactattccgcatacatctattgtccgggcgctgaaaaggaaagcattgcctggccattttattgacgtggttgagaacttgtataccgaagctacaacaagtatttctgttggtgggaagaatacttccagtatgccgttgacctctggggtcaaacaaggctgtcctctgagccctatccttttcaatctggtattggatgaacttatcacattaataggtgatgacaacggagttgacttgaatgacaagaagatcgccatacttgcctttgccgatgatctcgtcctgttaagccctaccacagacggcatggagaccaacctgaaactgtgtgagggattctttgataaaagatcaatgaagttgaacgccaggaagagtgtgagcctctccattgttagggctcacaaacggaagacaatgctcactgacgaacgtcctaagtggaaagttcatggagagtttcttcctactattaaacatactgaagaaatcaagtacttgggtgtccgttattctgcagcaggaaggagcattgctaagttccctaaactcgatcaatggctccaacggctgaagaaagccccacttaaaccacagcaacgcatacaaatggtcagatctacaattacttccaggctgattcatacgctccgattatcaagagtacacgctaaactcctgaaagacttggacaggaaaatccggtccttcgtcaaatcagtcctgcaccttccatccggaacaagtactgacttcttctacattcccgtgctcaaaggcggtctggggctgcaggaatttatgactctgattccagctgcaaagctgaagctcatcaacagtatgaagaagagctctgaccaagcagttattgccgcaatggaagtcgatcattggcttagagaggagcgctggtgccgtaaggtcactttgaatcaaggaaacaagaatgatgccgaacgcaggcgccttgcaaggtatataaacagcccacgaggcaaaagtcaagtggggttcgccaatttgccaggtcagtgccgttggttagagggcggggcaaaattaacgggccacgaatatattgtgggatgccacttaatgtcaaatacgctgccagttaggactcgcacttttcatggtgggcgcgacagagtggtcacctgcagatattgtccaggggtcctggaaacaccctcacacgcactccagagctgccccgtcgtgcgtaatgccgtaactaagcgccatgacctgatcttaactaaactccaacacttcctcactcctaactatgactcagtgattcgagaaccctggtttaatgggcgggaaggtaggatgaatcccgacttggtcctcaaacagggaaagatggtttatgtggttgatctgacaattccttacgacagttctcccgagttcattgactcacaagcccagcgaaaggtggcaaaatatgataccctcaagcccttgctgcaacagaagttccaagctgaaagagtagaggttataggcctggcattaggagcgcgcggcatgtacaccagcgccggtattcagacatgcttgaaactgggtctctctgatcgtcagcgacgatatatgggaatgatggccttgcgtttaacttgcgctgtgtggggaattttccggtctcaaccttctgggttgttcaacaaagtcccggacactggtactaccgatatctaa

SEQ ID NO: 1620 - DNA, 3726 bp, synthetic construct
  source 1..3726: mol_type = other DNA; note = FH-MCP-MG140-8_L655A
atggactacaaagacgatgacgacaagtacccctatgatgtacctgattatgctgccagcaatttcacacagttcgtccttgtagacaacggcggcaccggggatgttacagtggccccgagcaatttcgcaaacggcgtagccgagtggatctcctctaatagcagaagccaggcttataaggttacatgctctgtaaggcagtcttccgcacaaaatagaaagtacacaatcaaggtcgaagtgcccaaggttgctacacagaccgttggtggagaggagttgccagtggctgggtggcgctcctacctgaatatggagttaacaatccccattttcgctaccaattcagactgtgaactcattgtcaaagctatgcaaggtcttcttaaggatggtaacccaattccaagtgcaattgctgctaattcaggcatttattctggcggcagcagcggcggctcaagcggaagtgaaacacctggaacttccgaaagcgctacgcctgaatcttctggtggatcttctggcggatcttccgcatgcgtcgactacccaaccagtgccgaagtgcctcaaccctgccccgtatgtctgagctctttgatagatcctaaacagattagagatcactttcggaagaagcatcatggcgtgcttatgcactggacctgccggaagtgcggcaggttttggccaaataacaaaagtgctgcatctcactataggtattgtattaaaagtcttccgagtctcgaggggcctagcaaatcacacaagtgcatcgaatgcggcggatccttttcaaccctggcaggccttcaactccacaggaaacggaagcaccctgaagcctacaatgagtctctcccccggcccactgggaagaatcggccatggggagatgacgagctgaagcggctggcggccgtggagctcgatagcggcggtacaaagcatattaacattaaatgccaaaagcatctccctcataggacaatcgaggcaatcgcatctattcgcaagactgatcgctatcgcattatcttaagggaaatccggtctagccgatctataagccgagagacccgcgaggaagcaactacgtcaacacctgacagcagcaacgtgctggaacggttaacatcccgaatcgcagagctgaagtctggagattacagcccatccgtcgaagccattctcgcttataccgaacgctgcctcgaggatcgcaatgcaagtagtggtctgagcctgctgccttctgagatgtatatgcccaaacccacttccgcttcaaagataaacagaggtatgcgcacgcccttccggcctcaaaatcgaacgcagagaagacgtcaacattatcaacaggtccaattgctgtacaaacgcgatcggaaacaggcagctggcgtgatcttggacggatccccgctgcacgtcgtgcaaccggacgtggagaaggtagatgaaatctttagatcaagattttcccgaccttctccaccggatgacgcagagttcatttccagtcctgccggtgtcttaaatatggattatataactgcaggagagattcaacaatgtagggacagcatgaagaagaataacgcacccggtccagaccgcaacattacaatggacgtcctcttggcactggaactcccagtcctggagctgttgtttaacacgtggttagcccttaaacaggtacctgctgcatttaagacggctaggacaatactgatacccaagagcggcgatacctcagacccgaataattggcggcccattacaatatgtagcctcatctcaagactctacgccaaactgttagcctcaagattgtccaaatgtgccaacttatcagaaagacagaaggcttttcgacctgtcgatggttgcggcgagaatacagccatcctttcagccgttatcgctcaagctcgtaaaaccaagagtcaactgcatgtagtgttcttagatctggcaaaagcttttgatactattccgcatacatctattgtccgggcgctgaaaaggaaagcattgcctggccattttattgacgtggttgagaacttgtataccgaagctacaacaagtatttctgttggtgggaagaatacttccagtatgccgttgacctctggggtcaaacaaggctgtcctctgagccctatccttttcaatctggtattggatgaacttatcacattaataggtgatgacaacggagttgacttgaatgacaagaagatcgccatacttgcctttgccgatgatctcgtcctgttaagccctaccacagacggcatggagaccaacctgaaactgtgtgagggattctttgataaaagatcaatgaagttgaacgccaggaagagtgtgagcctctccattgttagggctcacaaacggaagacaatgctcactgacgaacgtcctaagtggaaagttcatggagagtttcttcctactattaaacatactgaagaaatcaagtacgccggtgtccgttattctgcagcaggaaggagcattgctaagttccctaaactcgatcaatggctccaacggctgaagaaagccccacttaaaccacagcaacgcatacaaatggtcagatctacaattacttccaggctgattcatacgctccgattatcaagagtacacgctaaactcctgaaagacttggacaggaaaatccggtccttcgtcaaatcagtcctgcaccttccatccggaacaagtactgacttcttctacattcccgtgctcaaaggcggtctggggctgcaggaatttatgactctgattccagctgcaaagctgaagctcatcaacagtatgaagaagagctctgaccaagcagttattgccgcaatggaagtcgatcattggcttagagaggagcgctggtgccgtaaggtcactttgaatcaaggaaacaagaatgatgccgaacgcaggcgccttgcaaggtatataaacagcccacgaggcaaaagtcaagtggggttcgccaatttgccaggtcagtgccgttggttagagggcggggcaaaattaacgggccacgaatatattgtgggatgccacttaatgtcaaatacgctgccagttaggactcgcacttttcatggtgggcgcgacagagtggtcacctgcagatattgtccaggggtcctggaaacaccctcacacgcactccagagctgccccgtcgtgcgtaatgccgtaactaagcgccatgacctgatcttaactaaactccaacacttcctcactcctaactatgactcagtgattcgagaaccctggtttaatgggcgggaaggtaggatgaatcccgacttggtcctcaaacagggaaagatggtttatgtggttgatctgacaattccttacgacagttctcccgagttcattgactcacaagcccagcgaaaggtggcaaaatatgataccctcaagcccttgctgcaacagaagttccaagctgaaagagtagaggttataggcctggcattaggagcgcgcggcatgtacaccagcgccggtattcagacatgcttgaaactgggtctctctgatcgtcagcgacgatatatgggaatgatggccttgcgtttaacttgcgctgtgtggggaattttccggtctcaaccttctgggttgttcaacaaagtcccggacactggtactaccgatatctaa

SEQ ID NO: 1621 - DNA, 3726 bp, synthetic construct
  source 1..3726: mol_type = other DNA; note = FH-MCP-MG140-8_L705A
atggactacaaagacgatgacgacaagtacccctatgatgtacctgattatgctgccagcaatttcacacagttcgtccttgtagacaacggcggcaccggggatgttacagtggccccgagcaatttcgcaaacggcgtagccgagtggatctcctctaatagcagaagccaggcttataaggttacatgctctgtaaggcagtcttccgcacaaaatagaaagtacacaatcaaggtcgaagtgcccaaggttgctacacagaccgttggtggagaggagttgccagtggctgggtggcgctcctacctgaatatggagttaacaatccccattttcgctaccaattcagactgtgaactcattgtcaaagctatgcaaggtcttcttaaggatggtaacccaattccaagtgcaattgctgctaattcaggcatttattctggcggcagcagcggcggctcaagcggaagtgaaacacctggaacttccgaaagcgctacgcctgaatcttctggtggatcttctggcggatcttccgcatgcgtcgactacccaaccagtgccgaagtgcctcaaccctgccccgtatgtctgagctctttgatagatcctaaacagattagagatcactttcggaagaagcatcatggcgtgcttatgcactggacctgccggaagtgcggcaggttttggccaaataacaaaagtgctgcatctcactataggtattgtattaaaagtcttccgagtctcgaggggcctagcaaatcacacaagtgcatcgaatgcggcggatccttttcaaccctggcaggccttcaactccacaggaaacggaagcaccctgaagcctacaatgagtctctcccccggcccactgggaagaatcggccatggggagatgacgagctgaagcggctggcggccgtggagctcgatagcggcggtacaaagcatattaacattaaatgccaaaagcatctccctcataggacaatcgaggcaatcgcatctattcgcaagactgatcgctatcgcattatcttaagggaaatccggtctagccgatctataagccgagagacccgcgaggaagcaactacgtcaacacctgacagcagcaacgtgctggaacggttaacatcccgaatcgcagagctgaagtctggagattacagcccatccgtcgaagccattctcgcttataccgaacgctgcctcgaggatcgcaatgcaagtagtggtctgagcctgctgccttctgagatgtatatgcccaaacccacttccgcttcaaagataaacagaggtatgcgcacgcccttccggcctcaaaatcgaacgcagagaagacgtcaacattatcaacaggtccaattgctgtacaaacgcgatcggaaacaggcagctggcgtgatcttggacggatccccgctgcacgtcgtgcaaccggacgtggagaaggtagatgaaatctttagatcaagattttcccgaccttctccaccggatgacgcagagttcatttccagtcctgccggtgtcttaaatatggattatataactgcaggagagattcaacaatgtagggacagcatgaagaagaataacgcacccggtccagaccgcaacattacaatggacgtcctcttggcactggaactcccagtcctggagctgttgtttaacacgtggttagcccttaaacaggtacctgctgcatttaagacggctaggacaatactgatacccaagagcggcgatacctcagacccgaataattggcggcccattacaatatgtagcctcatctcaagactctacgccaaactgttagcctcaagattgtccaaatgtgccaacttatcagaaagacagaaggcttttcgacctgtcgatggttgcggcgagaatacagccatcctttcagccgttatcgctcaagctcgtaaaaccaagagtcaactgcatgtagtgttcttagatctggcaaaagcttttgatactattccgcatacatctattgtccgggcgctgaaaaggaaagcattgcctggccattttattgacgtggttgagaacttgtataccgaagctacaacaagtatttctgttggtgggaagaatacttccagtatgccgttgacctctggggtcaaacaaggctgtcctctgagccctatccttttcaatctggtattggatgaacttatcacattaataggtgatgacaacggagttgacttgaatgacaagaagatcgccatacttgcctttgccgatgatctcgtcctgttaagccctaccacagacggcatggagaccaacctgaaactgtgtgagggattctttgataaaagatcaatgaagttgaacgccaggaagagtgtgagcctctccattgttagggctcacaaacggaagacaatgctcactgacgaacgtcctaagtggaaagttcatggagagtttcttcctactattaaacatactgaagaaatcaagtacttgggtgtccgttattctgcagcaggaaggagcattgctaagttccctaaactcgatcaatggctccaacggctgaagaaagccccacttaaaccacagcaacgcatacaaatggtcagatctacaattacttccaggctgattcatacggcccgattatcaagagtacacgctaaactcctgaaagacttggacaggaaaatccggtccttcgtcaaatcagtcctgcaccttccatccggaacaagtactgacttcttctacattcccgtgctcaaaggcggtctggggctgcaggaatttatgactctgattccagctgcaaagctgaagctcatcaacagtatgaagaagagctctgaccaagcagttattgccgcaatggaagtcgatcattggcttagagaggagcgctggtgccgtaaggtcactttgaatcaaggaaacaagaatgatgccgaacgcaggcgccttgcaaggtatataaacagcccacgaggcaaaagtcaagtggggttcgccaatttgccaggtcagtgccgttggttagagggcggggcaaaattaacgggccacgaatatattgtgggatgccacttaatgtcaaatacgctgccagttaggactcgcacttttcatggtgggcgcgacagagtggtcacctgcagatattgtccaggggtcctggaaacaccctcacacgcactccagagctgccccgtcgtgcgtaatgccgtaactaagcgccatgacctgatcttaactaaactccaacacttcctcactcctaactatgactcagtgattcgagaaccctggtttaatgggcgggaaggtaggatgaatcccgacttggtcctcaaacagggaaagatggtttatgtggttgatctgacaattccttacgacagttctcccgagttcattgactcacaagcccagcgaaaggtggcaaaatatgataccctcaagcccttgctgcaacagaagttccaagctgaaagagtagaggttataggcctggcattaggagcgcgcggcatgtacaccagcgccggtattcagacatgcttgaaactgggtctctctgatcgtcagcgacgatatatgggaatgatggccttgcgtttaacttgcgctgtgtggggaattttccggtctcaaccttctgggttgttcaacaaagtcccggacactggtactaccgatatctaa

SEQ ID NO: 1622 - DNA, 3726 bp, synthetic construct
  source 1..3726: mol_type = other DNA; note = FH-MCP-MG140-8_I722A
atggactacaaagacgatgacgacaagtacccctatgatgtacctgattatgctgccagcaatttcacacagttcgtccttgtagacaacggcggcaccggggatgttacagtggccccgagcaatttcgcaaacggcgtagccgagtggatctcctctaatagcagaagccaggcttataaggttacatgctctgtaaggcagtcttccgcacaaaatagaaagtacacaatcaaggtcgaagtgcccaaggttgctacacagaccgttggtggagaggagttgccagtggctgggtggcgctcctacctgaatatggagttaacaatccccattttcgctaccaattcagactgtgaactcattgtcaaagctatgcaaggtcttcttaaggatggtaacccaattccaagtgcaattgctgctaattcaggcatttattctggcggcagcagcggcggctcaagcggaagtgaaacacctggaacttccgaaagcgctacgcctgaatcttctggtggatcttctggcggatcttccgcatgcgtcgactacccaaccagtgccgaagtgcctcaaccctgccccgtatgtctgagctctttgatagatcctaaacagattagagatcactttcggaagaagcatcatggcgtgcttatgcactggacctgccggaagtgcggcaggttttggccaaataacaaaagtgctgcatctcactataggtattgtattaaaagtcttccgagtctcgaggggcctagcaaatcacacaagtgcatcgaatgcggcggatccttttcaaccctggcaggccttcaactccacaggaaacggaagcaccctgaagcctacaatgagtctctcccccggcccactgggaagaatcggccatggggagatgacgagctgaagcggctggcggccgtggagctcgatagcggcggtacaaagcatattaacattaaatgccaaaagcatctccctcataggacaatcgaggcaatcgcatctattcgcaagactgatcgctatcgcattatcttaagggaaatccggtctagccgatctataagccgagagacccgcgaggaagcaactacgtcaacacctgacagcagcaacgtgctggaacggttaacatcccgaatcgcagagctgaagtctggagattacagcccatccgtcgaagccattctcgcttataccgaacgctgcctcgaggatcgcaatgcaagtagtggtctgagcctgctgccttctgagatgtatatgcccaaacccacttccgcttcaaagataaacagaggtatgcgcacgcccttccggcctcaaaatcgaacgcagagaagacgtcaacattatcaacaggtccaattgctgtacaaacgcgatcggaaacaggcagctggcgtgatcttggacggatccccgctgcacgtcgtgcaaccggacgtggagaaggtagatgaaatctttagatcaagattttcccgaccttctccaccggatgacgcagagttcatttccagtcctgccggtgtcttaaatatggattatataactgcaggagagattcaacaatgtagggacagcatgaagaagaataacgcacccggtccagaccgcaacattacaatggacgtcctcttggcactggaactcccagtcctggagctgttgtttaacacgtggttagcccttaaacaggtacctgctgcatttaagacggctaggacaatactgatacccaagagcggcgatacctcagacccgaataattggcggcccattacaatatgtagcctcatctcaagactctacgccaaactgttagcctcaagattgtccaaatgtgccaacttatcagaaagacagaaggcttttcgacctgtcgatggttgcggcgagaatacagccatcctttcagccgttatcgctcaagctcgtaaaaccaagagtcaactgcatgtagtgttcttagatctggcaaaagcttttgatactattccgcatacatctattgtccgggcgctgaaaaggaaagcattgcctggccattttattgacgtggttgagaacttgtataccgaagctacaacaagtatttctgttggtgggaagaatacttccagtatgccgttgacctctggggtcaaacaaggctgtcctctgagccctatccttttcaatctggtattggatgaacttatcacattaataggtgatgacaacggagttgacttgaatgacaagaagatcgccatacttgcctttgccgatgatctcgtcctgttaagccctaccacagacggcatggagaccaacctgaaactgtgtgagggattctttgataaaagatcaatgaagttgaacgccaggaagagtgtgagcctctccattgttagggctcacaaacggaagacaatgctcactgacgaacgtcctaagtggaaagttcatggagagtttcttcctactattaaacatactgaagaaatcaagtacttgggtgtccgttattctgcagcaggaaggagcattgctaagttccctaaactcgatcaatggctccaacggctgaagaaagccccacttaaaccacagcaacgcatacaaatggtcagatctacaattacttccaggctgattcatacgctccgattatcaagagtacacgctaaactcctgaaagacttggacaggaaagcccggtccttcgtcaaatcagtcctgcaccttccatccggaacaagtactgacttcttctacattcccgtgctcaaaggcggtctggggctgcaggaatttatgactctgattccagctgcaaagctgaagctcatcaacagtatgaagaagagctctgaccaagcagttattgccgcaatggaagtcgatcattggcttagagaggagcgctggtgccgtaaggtcactttgaatcaaggaaacaagaatgatgccgaacgcaggcgccttgcaaggtatataaacagcccacgaggcaaaagtcaagtggggttcgccaatttgccaggtcagtgccgttggttagagggcggggcaaaattaacgggccacgaatatattgtgggatgccacttaatgtcaaatacgctgccagttaggactcgcacttttcatggtgggcgcgacagagtggtcacctgcagatattgtccaggggtcctggaaacaccctcacacgcactccagagctgccccgtcgtgcgtaatgccgtaactaagcgccatgacctgatcttaactaaactccaacacttcctcactcctaactatgactcagtgattcgagaaccctggtttaatgggcgggaaggtaggatgaatcccgacttggtcctcaaacagggaaagatggtttatgtggttgatctgacaattccttacgacagttctcccgagttcattgactcacaagcccagcgaaaggtggcaaaatatgataccctcaagcccttgctgcaacagaagttccaagctgaaagagtagaggttataggcctggcattaggagcgcgcggcatgtacaccagcgccggtattcagacatgcttgaaactgggtctctctgatcgtcagcgacgatatatgggaatgatggccttgcgtttaacttgcgctgtgtggggaattttccggtctcaaccttctgggttgttcaacaaagtcccggacactggtactaccgatatctaa

SEQ ID NO: 1623 - DNA, 3726 bp, synthetic construct
  source 1..3726: mol_type = other DNA; note = FH-MCP-MG140-8_Quadmutant
atggactacaaagacgatgacgacaagtacccctatgatgtacctgattatgctgccagcaatttcacacagttcgtccttgtagacaacggcggcaccggggatgttacagtggccccgagcaatttcgcaaacggcgtagccgagtggatctcctctaatagcagaagccaggcttataaggttacatgctctgtaaggcagtcttccgcacaaaatagaaagtacacaatcaaggtcgaagtgcccaaggttgctacacagaccgttggtggagaggagttgccagtggctgggtggcgctcctacctgaatatggagttaacaatccccattttcgctaccaattcagactgtgaactcattgtcaaagctatgcaaggtcttcttaaggatggtaacccaattccaagtgcaattgctgctaattcaggcatttattctggcggcagcagcggcggctcaagcggaagtgaaacacctggaacttccgaaagcgctacgcctgaatcttctggtggatcttctggcggatcttccgcatgcgtcgactacccaaccagtgccgaagtgcctcaaccctgccccgtatgtctgagctctttgatagatcctaaacagattagagatcactttcggaagaagcatcatggcgtgcttatgcactggacctgccggaagtgcggcaggttttggccaaataacaaaagtgctgcatctcactataggtattgtattaaaagtcttccgagtctcgaggggcctagcaaatcacacaagtgcatcgaatgcggcggatccttttcaaccctggcaggccttcaactccacaggaaacggaagcaccctgaagcctacaatgagtctctcccccggcccactgggaagaatcggccatggggagatgacgagctgaagcggctggcggccgtggagctcgatagcggcggtacaaagcatattaacattaaatgccaaaagcatctccctcataggacaatcgaggcaatcgcatctattcgcaagactgatcgctatcgcattatcttaagggaaatccggtctagccgatctataagccgagagacccgcgaggaagcaactacgtcaacacctgacagcagcaacgtgctggaacggttaacatcccgaatcgcagagctgaagtctggagattacagcccatccgtcgaagccattctcgcttataccgaacgctgcctcgaggatcgcaatgcaagtagtggtctgagcctgctgccttctgagatgtatatgcccaaacccacttccgcttcaaagataaacagaggtatgcgcacgcccttccggcctcaaaatcgaacgcagagaagacgtcaacattatcaacaggtccaattgctgtacaaacgcgatcggaaacaggcagctggcgtgatcttggacggatccccgctgcacgtcgtgcaaccggacgtggagaaggtagatgaaatctttagatcaagattttcccgaccttctccaccggatgacgcagagttcatttccagtcctgccggtgtcttaaatatggattatataactgcaggagagattcaacaatgtagggacagcatgaagaagaataacgcacccggtccagaccgcaacattacaatggacgtcctcttggcactggaactcccagtcctggagctgttgtttaacacgtggttagcccttaaacaggtacctgctgcatttaagacggctaggacaatactgatacccaagagcggcgatacctcagacccgaataattggcggcccattacaatatgtagcctcatctcaagactctacgccaaactgttagcctcaagattgtccaaatgtgccaacttatcagaaagacagaaggcttttcgacctgtcgccggttgcggcgagaatacagccatcctttcagccgttatcgctcaagctcgtaaaaccaagagtcaactgcatgtagtgttcttagatctggcaaaagcttttgatactattccgcatacatctattgtccgggcgctgaaaaggaaagcattgcctggccattttattgacgtggttgagaacttgtataccgaagctacaacaagtatttctgttggtgggaagaatacttccagtatgccgttgacctctggggtcaaacaaggctgtcctctgagccctatccttttcaatctggtattggatgaacttatcacattaataggtgatgacaacggagttgacttgaatgacaagaagatcgccatacttgcctttgccgatgatctcgtcctgttaagccctaccacagacggcatggagaccaacctgaaactgtgtgagggattctttgataaaagatcaatgaagttgaacgccaggaagagtgtgagcctctccattgttagggctcacaaacggaagacaatgctcactgacgaacgtcctaagtggaaagttcatggagagtttcttcctactattaaacatactgaagaaatcaagtacgccggtgtccgttattctgcagcaggaaggagcattgctaagttccctaaactcgatcaatggctccaacggctgaagaaagccccacttaaaccacagcaacgcatacaaatggtcagatctacaattacttccaggctgattcatacggcccgattatcaagagtacacgctaaactcctgaaagacttggacaggaaagcccggtccttcgtcaaatcagtcctgcaccttccatccggaacaagtactgacttcttctacattcccgtgctcaaaggcggtctggggctgcaggaatttatgactctgattccagctgcaaagctgaagctcatcaacagtatgaagaagagctctgaccaagcagttattgccgcaatggaagtcgatcattggcttagagaggagcgctggtgccgtaaggtcactttgaatcaaggaaacaagaatgatgccgaacgcaggcgccttgcaaggtatataaacagcccacgaggcaaaagtcaagtggggttcgccaatttgccaggtcagtgccgttggttagagggcggggcaaaattaacgggccacgaatatattgtgggatgccacttaatgtcaaatacgctgccagttaggactcgcacttttcatggtgggcgcgacagagtggtcacctgcagatattgtccaggggtcctggaaacaccctcacacgcactccagagctgccccgtcgtgcgtaatgccgtaactaagcgccatgacctgatcttaactaaactccaacacttcctcactcctaactatgactcagtgattcgagaaccctggtttaatgggcgggaaggtaggatgaatcccgacttggtcctcaaacagggaaagatggtttatgtggttgatctgacaattccttacgacagttctcccgagttcattgactcacaagcccagcgaaaggtggcaaaatatgataccctcaagcccttgctgcaacagaagttccaagctgaaagagtagaggttataggcctggcattaggagcgcgcggcatgtacaccagcgccggtattcagacatgcttgaaactgggtctctctgatcgtcagcgacgatatatgggaatgatggccttgcgtttaacttgcgctgtgtggggaattttccggtctcaaccttctgggttgttcaacaaagtcccggacactggtactaccgatatctaa

SEQ ID NO: 1624 - DNA, 1848 bp, synthetic construct
  source 1..1848: mol_type = other DNA; note = FH-MCP-MG153-5
atggactacaaagacgatgacgacaagtacccctatgatgtacctgattatgctgccagcaatttcacacagttcgtccttgtagacaacggcggcaccggggatgttacagtggccccgagcaatttcgcaaacggcgtagccgagtggatctcctctaatagcagaagccaggcttataaggttacatgctctgtaaggcagtcttccgcacaaaatagaaagtacacaatcaaggtcgaagtgcccaaggttgctacacagaccgttggtggagaggagttgccagtggctgggtggcgctcctacctgaatatggagttaacaatccccattttcgctaccaattcagactgtgaactcattgtcaaagctatgcaaggtcttcttaaggatggtaacccaattccaagtgcaattgctgctaattcaggcatttattctggcggcagcagcggcggctcaagcggaagtgaaacacctggaacttccgaaagcgctacgcctgaatcttctggtggatcttctggcggatcttccgcatgcgtcgacatggatacttcctctttaatggagcagatcttgagtaacgagaaccttaatgctgcttatcttcaagtggtacggaacaagggggccgctggcgtggatggaatggagtacaccgaattacagaaacatctgtcagagaacggggagataattaaagaacagctccgcacccgaaagtacaaacctcagcccgttcggagagtggaaattcctaaggccgacggtggcatacgcaagctcggcgtgcctactgttaccgacaggtttattcagcaggcaattgcgcaggttctgacgcccatctacgaagagcagttccacaatcattcatatggctttagacctaatcgatgtgcacagcaggccgtgatgaaagctctggagatgatgaatgatggtcactcatggatagtggacatagatctggagagatttttcgatacagttgaccacgataaacttatgacgatcatcgggaggacaatcaaagacggcgacgtgatctctattatccggaagttcttagtctccggcatcatggttgacggagagtatgaggactcagtcattggtactcctcagggcggaaacctttcacctttgctcgcgaatatcatgctcaacgagctggataaagaaatggaggctcgcggcctcgatttcgtgcgctatgctgacgactgcattattatggtgggttcaaggcaggcagctgagagagtgatcagatcaattacaaggtacatcgaggagaaactgggcctgaaagtgaacgcatccaagagcaaaattgacaaacccaaaggcataaagtacctgggctttgggttttactacgatagttttgcgaaagaatatagggccaagccacatgccaaggcagtagagaaatttaaggcacggatgaaggaactgacatgtagatcatggggtgtggacaatgggtacaaagtgaaaaagttaaacgaactgatcaggggatggattaattattttaaaattggcagtatgaaagggctctgcgaaaagctggacgccaatatccggtaccgcctgcgaatgtgtatatggaagcactggaagactcctcagaatcgggccaagaatttgataaaactcggtatctcccgccgatacgcctggtccaccgcctactccggagcgagaatcgcctacgtgtgccagagaggagccatgaacattgctgtgacaaaggaaaggttgacaagatttgggctggtgagtatgttggactattacgtggagcgccgctccttaatgttgagtgatatctga

SEQ ID NO: 1625 - DNA, 1848 bp, synthetic construct
  source 1..1848: mol_type = other DNA; note = FH-MCP-MG153-5E14R
atggactacaaagacgatgacgacaagtacccctatgatgtacctgattatgctgccagcaatttcacacagttcgtccttgtagacaacggcggcaccggggatgttacagtggccccgagcaatttcgcaaacggcgtagccgagtggatctcctctaatagcagaagccaggcttataaggttacatgctctgtaaggcagtcttccgcacaaaatagaaagtacacaatcaaggtcgaagtgcccaaggttgctacacagaccgttggtggagaggagttgccagtggctgggtggcgctcctacctgaatatggagttaacaatccccattttcgctaccaattcagactgtgaactcattgtcaaagctatgcaaggtcttcttaaggatggtaacccaattccaagtgcaattgctgctaattcaggcatttattctggcggcagcagcggcggctcaagcggaagtgaaacacctggaacttccgaaagcgctacgcctgaatcttctggtggatcttctggcggatcttccgcatgcgtcgacatggatacttcctctttaatggagcagatcttgagtaacaggaaccttaatgctgcttatcttcaagtggtacggaacaagggggccgctggcgtggatggaatggagtacaccgaattacagaaacatctgtcagagaacggggagataattaaagaacagctccgcacccgaaagtacaaacctcagcccgttcggagagtggaaattcctaaggccgacggtggcatacgcaagctcggcgtgcctactgttaccgacaggtttattcagcaggcaattgcgcaggttctgacgcccatctacgaagagcagttccacaatcattcatatggctttagacctaatcgatgtgcacagcaggccgtgatgaaagctctggagatgatgaatgatggtcactcatggatagtggacatagatctggagagatttttcgatacagttgaccacgataaacttatgacgatcatcgggaggacaatcaaagacggcgacgtgatctctattatccggaagttcttagtctccggcatcatggttgacggagagtatgaggactcagtcattggtactcctcagggcggaaacctttcacctttgctcgcgaatatcatgctcaacgagctggataaagaaatggaggctcgcggcctcgatttcgtgcgctatgctgacgactgcattattatggtgggttcaaggcaggcagctgagagagtgatcagatcaattacaaggtacatcgaggagaaactgggcctgaaagtgaacgcatccaagagcaaaattgacaaacccaaaggcataaagtacctgggctttgggttttactacgatagttttgcgaaagaatatagggccaagccacatgccaaggcagtagagaaatttaaggcacggatgaaggaactgacatgtagatcatggggtgtggacaatgggtacaaagtgaaaaagttaaacgaactgatcaggggatggattaattattttaaaattggcagtatgaaagggctctgcgaaaagctggacgccaatatccggtaccgcctgcgaatgtgtatatggaagcactggaagactcctcagaatcgggccaagaatttgataaaactcggtatctcccgccgatacgcctggtccaccgcctactccggagcgagaatcgcctacgtgtgccagagaggagccatgaacattgctgtgacaaaggaaaggttgacaagatttgggctggtgagtatgttggactattacgtggagcgccgctccttaatgttgagtgatatctga

SEQ ID NO: 1626 - DNA, 1848 bp, synthetic construct
  source 1..1848: mol_type = other DNA; note = FH-MCP-MG153-5N26R
atggactacaaagacgatgacgacaagtacccctatgatgtacctgattatgctgccagcaatttcacacagttcgtccttgtagacaacggcggcaccggggatgttacagtggccccgagcaatttcgcaaacggcgtagccgagtggatctcctctaatagcagaagccaggcttataaggttacatgctctgtaaggcagtcttccgcacaaaatagaaagtacacaatcaaggtcgaagtgcccaaggttgctacacagaccgttggtggagaggagttgccagtggctgggtggcgctcctacctgaatatggagttaacaatccccattttcgctaccaattcagactgtgaactcattgtcaaagctatgcaaggtcttcttaaggatggtaacccaattccaagtgcaattgctgctaattcaggcatttattctggcggcagcagcggcggctcaagcggaagtgaaacacctggaacttccgaaagcgctacgcctgaatcttctggtggatcttctggcggatcttccgcatgcgtcgacatggatacttcctctttaatggagcagatcttgagtaacgagaaccttaatgctgcttatcttcaagtggtacggaggaagggggccgctggcgtggatggaatggagtacaccgaattacagaaacatctgtcagagaacggggagataattaaagaacagctccgcacccgaaagtacaaacctcagcccgttcggagagtggaaattcctaaggccgacggtggcatacgcaagctcggcgtgcctactgttaccgacaggtttattcagcaggcaattgcgcaggttctgacgcccatctacgaagagcagttccacaatcattcatatggctttagacctaatcgatgtgcacagcaggccgtgatgaaagctctggagatgatgaatgatggtcactcatggatagtggacatagatctggagagatttttcgatacagttgaccacgataaacttatgacgatcatcgggaggacaatcaaagacggcgacgtgatctctattatccggaagttcttagtctccggcatcatggttgacggagagtatgaggactcagtcattggtactcctcagggcggaaacctttcacctttgctcgcgaatatcatgctcaacgagctggataaagaaatggaggctcgcggcctcgatttcgtgcgctatgctgacgactgcattattatggtgggttcaaggcaggcagctgagagagtgatcagatcaattacaaggtacatcgaggagaaactgggcctgaaagtgaacgcatccaagagcaaaattgacaaacccaaaggcataaagtacctgggctttgggttttactacgatagttttgcgaaagaatatagggccaagccacatgccaaggcagtagagaaatttaaggcacggatgaaggaactgacatgtagatcatggggtgtggacaatgggtacaaagtgaaaaagttaaacgaactgatcaggggatggattaattattttaaaattggcagtatgaaagggctctgcgaaaagctggacgccaatatccggtaccgcctgcgaatgtgtatatggaagcactggaagactcctcagaatcgggccaagaatttgataaaactcggtatctcccgccgatacgcctggtccaccgcctactccggagcgagaatcgcctacgtgtgccagagaggagccatgaacattgctgtgacaaaggaaaggttgacaagatttgggctggtgagtatgttggactattacgtggagcgccgctccttaatgttgagtgatatctga

SEQ ID NO: 1627 - DNA, 1848 bp, synthetic construct
  source 1..1848: mol_type = other DNA; note = FH-MCP-MG153-5D74R
atggactacaaagacgatgacgacaagtacccctatgatgtacctgattatgctgccagcaatttcacacagttcgtccttgtagacaacggcggcaccggggatgttacagtggccccgagcaatttcgcaaacggcgtagccgagtggatctcctctaatagcagaagccaggcttataaggttacatgctctgtaaggcagtcttccgcacaaaatagaaagtacacaatcaaggtcgaagtgcccaaggttgctacacagaccgttggtggagaggagttgccagtggctgggtggcgctcctacctgaatatggagttaacaatccccattttcgctaccaattcagactgtgaactcattgtcaaagctatgcaaggtcttcttaaggatggtaacccaattccaagtgcaattgctgctaattcaggcatttattctggcggcagcagcggcggctcaagcggaagtgaaacacctggaacttccgaaagcgctacgcctgaatcttctggtggatcttctggcggatcttccgcatgcgtcgacatggatacttcctctttaatggagcagatcttgagtaacgagaaccttaatgctgcttatcttcaagtggtacggaacaagggggccgctggcgtggatggaatggagtacaccgaattacagaaacatctgtcagagaacggggagataattaaagaacagctccgcacccgaaagtacaaacctcagcccgttcggagagtggaaattcctaaggccaggggtggcatacgcaagctcggcgtgcctactgttaccgacaggtttattcagcaggcaattgcgcaggttctgacgcccatctacgaagagcagttccacaatcattcatatggctttagacctaatcgatgtgcacagcaggccgtgatgaaagctctggagatgatgaatgatggtcactcatggatagtggacatagatctggagagatttttcgatacagttgaccacgataaacttatgacgatcatcgggaggacaatcaaagacggcgacgtgatctctattatccggaagttcttagtctccggcatcatggttgacggagagtatgaggactcagtcattggtactcctcagggcggaaacctttcacctttgctcgcgaatatcatgctcaacgagctggataaagaaatggaggctcgcggcctcgatttcgtgcgctatgctgacgactgcattattatggtgggttcaaggcaggcagctgagagagtgatcagatcaattacaaggtacatcgaggagaaactgggcctgaaagtgaacgcatccaagagcaaaattgacaaacccaaaggcataaagtacctgggctttgggttttactacgatagttttgcgaaagaatatagggccaagccacatgccaaggcagtagagaaatttaaggcacggatgaaggaactgacatgtagatcatggggtgtggacaatgggtacaaagtgaaaaagttaaacgaactgatcaggggatggattaattattttaaaattggcagtatgaaagggctctgcgaaaagctggacgccaatatccggtaccgcctgcgaatgtgtatatggaagcactggaagactcctcagaatcgggccaagaatttgataaaactcggtatctcccgccgatacgcctggtccaccgcctactccggagcgagaatcgcctacgtgtgccagagaggagccatgaacattgctgtgacaaaggaaaggttgacaagatttgggctggtgagtatgttggactattacgtggagcgccgctccttaatgttgagtgatatctga

SEQ ID NO: 1628 - DNA, 1848 bp, synthetic construct
  source 1..1848: mol_type = other DNA; note = FH-MCP-MG153-5N116K
atggactacaaagacgatgacgacaagtacccctatgatgtacctgattatgctgccagcaatttcacacagttcgtccttgtagacaacggcggcaccggggatgttacagtggccccgagcaatttcgcaaacggcgtagccgagtggatctcctctaatagcagaagccaggcttataaggttacatgctctgtaaggcagtcttccgcacaaaatagaaagtacacaatcaaggtcgaagtgcccaaggttgctacacagaccgttggtggagaggagttgccagtggctgggtggcgctcctacctgaatatggagttaacaatccccattttcgctaccaattcagactgtgaactcattgtcaaagctatgcaaggtcttcttaaggatggtaacccaattccaagtgcaattgctgctaattcaggcatttattctggcggcagcagcggcggctcaagcggaagtgaaacacctggaacttccgaaagcgctacgcctgaatcttctggtggatcttctggcggatcttccgcatgcgtcgacatggatacttcctctttaatggagcagatcttgagtaacgagaaccttaatgctgcttatcttcaagtggtacggaacaagggggccgctggcgtggatggaatggagtacaccgaattacagaaacatctgtcagagaacggggagataattaaagaacagctccgcacccgaaagtacaaacctcagcccgttcggagagtggaaattcctaaggccgacggtggcatacgcaagctcggcgtgcctactgttaccgacaggtttattcagcaggcaattgcgcaggttctgacgcccatctacgaagagcagttccacaatcattcatatggctttagacctaagcgatgtgcacagcaggccgtgatgaaagctctggagatgatgaatgatggtcactcatggatagtggacatagatctggagagatttttcgatacagttgaccacgataaacttatgacgatcatcgggaggacaatcaaagacggcgacgtgatctctattatccggaagttcttagtctccggcatcatggttgacggagagtatgaggactcagtcattggtactcctcagggcggaaacctttcacctttgctcgcgaatatcatgctcaacgagctggataaagaaatggaggctcgcggcctcgatttcgtgcgctatgctgacgactgcattattatggtgggttcaaggcaggcagctgagagagtgatcagatcaattacaaggtacatcgaggagaaactgggcctgaaagtgaacgcatccaagagcaaaattgacaaacccaaaggcataaagtacctgggctttgggttttactacgatagttttgcgaaagaatatagggccaagccacatgccaaggcagtagagaaatttaaggcacggatgaaggaactgacatgtagatcatggggtgtggacaatgggtacaaagtgaaaaagttaaacgaactgatcaggggatggattaattattttaaaattggcagtatgaaagggctctgcgaaaagctggacgccaatatccggtaccgcctgcgaatgtgtatatggaagcactggaagactcctcagaatcgggccaagaatttgataaaactcggtatctcccgccgatacgcctggtccaccgcctactccggagcgagaatcgcctacgtgtgccagagaggagccatgaacattgctgtgacaaaggaaaggttgacaagatttgggctggtgagtatgttggactattacgtggagcgccgctccttaatgttgagtgatatctga

SEQ ID NO: 1629 - DNA, 1848 bp, synthetic construct
  source 1..1848: mol_type = other DNA; note = FH-MCP-MG153-5N197R
atggactacaaagacgatgacgacaagtacccctatgatgtacctgattatgctgccagcaatttcacacagttcgtccttgtagacaacggcggcaccggggatgttacagtggccccgagcaatttcgcaaacggcgtagccgagtggatctcctctaatagcagaagccaggcttataaggttacatgctctgtaaggcagtcttccgcacaaaatagaaagtacacaatcaaggtcgaagtgcccaaggttgctacacagaccgttggtggagaggagttgccagtggctgggtggcgctcctacctgaatatggagttaacaatccccattttcgctaccaattcagactgtgaactcattgtcaaagctatgcaaggtcttcttaaggatggtaacccaattccaagtgcaattgctgctaattcaggcatttattctggcggcagcagcggcggctcaagcggaagtgaaacacctggaacttccgaaagcgctacgcctgaatcttctggtggatcttctggcggatcttccgcatgcgtcgacatggatacttcctctttaatggagcagatcttgagtaacgagaaccttaatgctgcttatcttcaagtggtacggaacaagggggccgctggcgtggatggaatggagtacaccgaattacagaaacatctgtcagagaacggggagataattaaagaacagctccgcacccgaaagtacaaacctcagcccgttcggagagtggaaattcctaaggccgacggtggcatacgcaagctcggcgtgcctactgttaccgacaggtttattcagcaggcaattgcgcaggttctgacgcccatctacgaagagcagttccacaatcattcatatggctttagacctaatcgatgtgcacagcaggccgtgatgaaagctctggagatgatgaatgatggtcactcatggatagtggacatagatctggagagatttttcgatacagttgaccacgataaacttatgacgatcatcgggaggacaatcaaagacggcgacgtgatctctattatccggaagttcttagtctccggcatcatggttgacggagagtatgaggactcagtcattggtactcctcagggcggaaggctttcacctttgctcgcgaatatcatgctcaacgagctggataaagaaatggaggctcgcggcctcgatttcgtgcgctatgctgacgactgcattattatggtgggttcaaggcaggcagctgagagagtgatcagatcaattacaaggtacatcgaggagaaactgggcctgaaagtgaacgcatccaagagcaaaattgacaaacccaaaggcataaagtacctgggctttgggttttactacgatagttttgcgaaagaatatagggccaagccacatgccaaggcagtagagaaatttaaggcacggatgaaggaactgacatgtagatcatggggtgtggacaatgggtacaaagtgaaaaagttaaacgaactgatcaggggatggattaattattttaaaattggcagtatgaaagggctctgcgaaaagctggacgccaatatccggtaccgcctgcgaatgtgtatatggaagcactggaagactcctcagaatcgggccaagaatttgataaaactcggtatctcccgccgatacgcctggtccaccgcctactccggagcgagaatcgcctacgtgtgccagagaggagccatgaacattgctgtgacaaaggaaaggttgacaagatttgggctggtgagtatgttggactattacgtggagcgccgctccttaatgttgagtgatatctga

SEQ ID NO: 1630 - DNA, 1848 bp, synthetic construct
  source 1..1848: mol_type = other DNA; note = FH-MCP-MG153-5Pentamutant
atggactacaaagacgatgacgacaagtacccctatgatgtacctgattatgctgccagcaatttcacacagttcgtccttgtagacaacggcggcaccggggatgttacagtggccccgagcaatttcgcaaacggcgtagccgagtggatctcctctaatagcagaagccaggcttataaggttacatgctctgtaaggcagtcttccgcacaaaatagaaagtacacaatcaaggtcgaagtgcccaaggttgctacacagaccgttggtggagaggagttgccagtggctgggtggcgctcctacctgaatatggagttaacaatccccattttcgctaccaattcagactgtgaactcattgtcaaagctatgcaaggtcttcttaaggatggtaacccaattccaagtgcaattgctgctaattcaggcatttattctggcggcagcagcggcggctcaagcggaagtgaaacacctggaacttccgaaagcgctacgcctgaatcttctggtggatcttctggcggatcttccgcatgcgtcgacatggatacttcctctttaatggagcagatcttgagtaacaggaaccttaatgctgcttatcttcaagtggtacggaggaagggggccgctggcgtggatggaatggagtacaccgaattacagaaacatctgtcagagaacggggagataattaaagaacagctccgcacccgaaagtacaaacctcagcccgttcggagagtggaaattcctaaggccaggggtggcatacgcaagctcggcgtgcctactgttaccgacaggtttattcagcaggcaattgcgcaggttctgacgcccatctacgaagagcagttccacaatcattcatatggctttagacctaagcgatgtgcacagcaggccgtgatgaaagctctggagatgatgaatgatggtcactcatggatagtggacatagatctggagagatttttcgatacagttgaccacgataaacttatgacgatcatcgggaggacaatcaaagacggcgacgtgatctctattatccggaagttcttagtctccggcatcatggttgacggagagtatgaggactcagtcattggtactcctcagggcggaaggctttcacctttgctcgcgaatatcatgctcaacgagctggataaagaaatggaggctcgcggcctcgatttcgtgcgctatgctgacgactgcattattatggtgggttcaaggcaggcagctgagagagtgatcagatcaattacaaggtacatcgaggagaaactgggcctgaaagtgaacgcatccaagagcaaaattgacaaacccaaaggcataaagtacctgggctttgggttttactacgatagttttgcgaaagaatatagggccaagccacatgccaaggcagtagagaaatttaaggcacggatgaaggaactgacatgtagatcatggggtgtggacaatgggtacaaagtgaaaaagttaaacgaactgatcaggggatggattaattattttaaaattggcagtatgaaagggctctgcgaaaagctggacgccaatatccggtaccgcctgcgaatgtgtatatggaagcactggaagactcctcagaatcgggccaagaatttgataaaactcggtatctcccgccgatacgcctggtccaccgcctactccggagcgagaatcgcctacgtgtgccagagaggagccatgaacattgctgtgacaaaggaaaggttgacaagatttgggctggtgagtatgttggactattacgtggagcgccgctccttaatgttgagtgatatctga

SEQ ID NO: 1631 - DNA, 1848 bp, synthetic construct
  source 1..1848: mol_type = other DNA; note = FH-MCP-MG153-5 Rtdead
atggactacaaagacgatgacgacaagtacccctatgatgtacctgattatgctgccagcaatttcacacagttcgtccttgtagacaacggcggcaccggggatgttacagtggccccgagcaatttcgcaaacggcgtagccgagtggatctcctctaatagcagaagccaggcttataaggttacatgctctgtaaggcagtcttccgcacaaaatagaaagtacacaatcaaggtcgaagtgcccaaggttgctacacagaccgttggtggagaggagttgccagtggctgggtggcgctcctacctgaatatggagttaacaatccccattttcgctaccaattcagactgtgaactcattgtcaaagctatgcaaggtcttcttaaggatggtaacccaattccaagtgcaattgctgctaattcaggcatttattctggcggcagcagcggcggctcaagcggaagtgaaacacctggaacttccgaaagcgctacgcctgaatcttctggtggatcttctggcggatcttccgcatgcgtcgacatggatacttcctctttaatggagcagatcttgagtaacgagaaccttaatgctgcttatcttcaagtggtacggaacaagggggccgctggcgtggatggaatggagtacaccgaattacagaaacatctgtcagagaacggggagataattaaagaacagctccgcacccgaaagtacaaacctcagcccgttcggagagtggaaattcctaaggccgacggtggcatacgcaagctcggcgtgcctactgttaccgacaggtttattcagcaggcaattgcgcaggttctgacgcccatctacgaagagcagttccacaatcattcatatggctttagacctaatcgatgtgcacagcaggccgtgatgaaagctctggagatgatgaatgatggtcactcatggatagtggacatagatctggagagatttttcgatacagttgaccacgataaacttatgacgatcatcgggaggacaatcaaagacggcgacgtgatctctattatccggaagttcttagtctccggcatcatggttgacggagagtatgaggactcagtcattggtactcctcagggcggaaacctttcacctttgctcgcgaatatcatgctcaacgagctggataaagaaatggaggctcgcggcctcgatttcgtgcgctatgcttacgactgcattattatggtgggttcaaggcaggcagctgagagagtgatcagatcaattacaaggtacatcgaggagaaactgggcctgaaagtgaacgcatccaagagcaaaattgacaaacccaaaggcataaagtacctgggctttgggttttactacgatagttttgcgaaagaatatagggccaagccacatgccaaggcagtagagaaatttaaggcacggatgaaggaactgacatgtagatcatggggtgtggacaatgggtacaaagtgaaaaagttaaacgaactgatcaggggatggattaattattttaaaattggcagtatgaaagggctctgcgaaaagctggacgccaatatccggtaccgcctgcgaatgtgtatatggaagcactggaagactcctcagaatcgggccaagaatttgataaaactcggtatctcccgccgatacgcctggtccaccgcctactccggagcgagaatcgcctacgtgtgccagagaggagccatgaacattgctgtgacaaaggaaaggttgacaagatttgggctggtgagtatgttggactattacgtggagcgccgctccttaatgttgagtgatatctga

SEQ ID NO: 1632 - DNA, 1842 bp, synthetic construct; identical to SEQ ID NO: 753
  source 1..1842: mol_type = other DNA; note = FH-MCP-MG153-51

SEQ ID NO: 1633 - DNA, 1842 bp, synthetic construct
  source 1..1842: mol_type = other DNA; note = FH-MCP-MG153-51N31R
atggactacaaagacgatgacgacaagtacccctatgatgtacctgattatgctgccagcaatttcacacagttcgtccttgtagacaacggcggcaccggggatgttacagtggccccgagcaatttcgcaaacggcgtagccgagtggatctcctctaatagcagaagccaggcttataaggttacatgctctgtaaggcagtcttccgcacaaaatagaaagtacacaatcaaggtcgaagtgcccaaggttgctacacagaccgttggtggagaggagttgccagtggctgggtggcgctcctacctgaatatggagttaacaatccccattttcgctaccaattcagactgtgaactcattgtcaaagctatgcaaggtcttcttaaggatggtaacccaattccaagtgcaattgctgctaattcaggcatttattctggcggcagcagcggcggctcaagcggaagtgaaacacctggaacttccgaaagcgctacgcctgaatcttctggtggatcttctggcggatcttccgcatgcgtcgacggcgacacaatgactaagcggaaacaccattcactgtacggccagattctccagagactggacactgctttcgcaaaggtgaaggcaaggagaggagccgcaggaatcgatggcgaaagtatcgccgaatttgagcaggatctcgaagccaatttggcacaacttaagagagacctcaaggagaagacatatgctcctcagccagtgcggcgagtctatattcctaaggcttccggtggtcagagaccactcggcattcctacagtcagagaccgggttgtgcagcaggccctgagactggtgctcgagcccgtgttcgaaccgctcttttgcgatagcagctatgggttcaggcctgggcgcagtgcccatcaagctctggatagggtcagcggccatttgagagagggttacaagtgggttgtggattgcgatctgaaatcttattttgatactatcccgcaggaggcccttattgaccgggtcgccgaggaagtcgccgatggcactgttctgaaactcatcagatcttttctgcaagctggagtaatgtctgaagggcagttgcagagaaccatagctggcacgccccagggtggtgtgatctcaccattgctcgccaacatctaccttcacggctttgatcagctcatggaggacagaggactgcgacttacaaggtacgctgacgacttcgtgatcctttgtcgaacccagagagcagcagaacgcgtgatgggtaatgtgcagtcttatcttgaaggccaactggggcttaccgtcaatcgcgagaagagcaaggtggtgcatttgtccgaagggttcgtattccttggatacgagtttgggacgtggggacgaaggcccggaccaaaggctattctgaggtttaaacagcggattagagagctgactcgccggaatcagaccatacctgtagacaaaatggtacgcgagcagctgaacccttaccttcaagggtgggctgggtactttgggtatggccaagtgaggcagcgcttcctggactacgataaatggattcggaggaggctgaggatggtccaattgcggtcctggcgacacatgaaaggcctgcacagggcaatgcgacagaaaggatggaaaggtcccctgcccgccgtctatgttaatatgagacggtggaggtcaagtgttcacagccttgttaactatgccctgggacccgattggatacgcggcttgggacttgtgtcccttgttgacttccaccggccaaccatggtgaccgtaacacgcgatatctga

SEQ ID NO: 1634 - DNA, 1842 bp, synthetic construct
  source 1..1842: mol_type = other DNA; note = FH-MCP-MG153-51S79R
atggactacaaagacgatgacgacaagtacccctatgatgtacctgattatgctgccagcaatttcacacagttcgtccttgtagacaacggcggcaccggggatgttacagtggccccgagcaatttcgcaaacggcgtagccgagtggatctcctctaatagcagaagccaggcttataaggttacatgctctgtaaggcagtcttccgcacaaaatagaaagtacacaatcaaggtcgaagtgcccaaggttgctacacagaccgttggtggagaggagttgccagtggctgggtggcgctcctacctgaatatggagttaacaatccccattttcgctaccaattcagactgtgaactcattgtcaaagctatgcaaggtcttcttaaggatggtaacccaattccaagtgcaattgctgctaattcaggcatttattctggcggcagcagcggcggctcaagcggaagtgaaacacctggaacttccgaaagcgctacgcctgaatcttctggtggatcttctggcggatcttccgcatgcgtcgacggcgacacaatgactaagcggaaacaccattcactgtacggccagattctccagagactggacactgctttcgcaaaggtgaaggcaaacagaggagccgcaggaatcgatggcgaaagtatcgccgaatttgagcaggatctcgaagccaatttggcacaacttaagagagacctcaaggagaagacatatgctcctcagccagtgcggcgagtctatattcctaaggctaggggtggtcagagaccactcggcattcctacagtcagagaccgggttgtgcagcaggccctgagactggtgctcgagcccgtgttcgaaccgctcttttgcgatagcagctatgggttcaggcctgggcgcagtgcccatcaagctctggatagggtcagcggccatttgagagagggttacaagtgggttgtggattgcgatctgaaatcttattttgatactatcccgcaggaggcccttattgaccgggtcgccgaggaagtcgccgatggcactgttctgaaactcatcagatcttttctgcaagctggagtaatgtctgaagggcagttgcagagaaccatagctggcacgccccagggtggtgtgatctcaccattgctcgccaacatctaccttcacggctttgatcagctcatggaggacagaggactgcgacttacaaggtacgctgacgacttcgtgatcctttgtcgaacccagagagcagcagaacgcgtgatgggtaatgtgcagtcttatcttgaaggccaactggggcttaccgtcaatcgcgagaagagcaaggtggtgcatttgtccgaagggttcgtattccttggatacgagtttgggacgtggggacgaaggcccggaccaaaggctattctgaggtttaaacagcggattagagagctgactcgccggaatcagaccatacctgtagacaaaatggtacgcgagcagctgaacccttaccttcaagggtgggctgggtactttgggtatggccaagtgaggcagcgcttcctggactacgataaatggattcggaggaggctgaggatggtccaattgcggtcctggcgacacatgaaaggcctgcacagggcaatgcgacagaaaggatggaaaggtcccctgcccgccgtctatgttaatatgagacggtggaggtcaagtgttcacagccttgttaactatgccctgggacccgattggatacgcggcttgggacttgtgtcccttgttgacttccaccggccaaccatggtgaccgtaacacgcgatatctga

SEQ ID NO: 1635 - DNA, 1842 bp, synthetic construct
  source 1..1842: mol_type = other DNA; note = FH-MCP-MG153-51G121K
atggactacaaagacgatgacgacaagtacccctatgatgtacctgattatgctgccagcaatttcacacagttcgtccttgtagacaacggcggcaccggggatgttacagtggccccgagcaatttcgcaaacggcgtagccgagtggatctcctctaatagcagaagccaggcttataaggttacatgctctgtaaggcagtcttccgcacaaaatagaaagtacacaatcaaggtcgaagtgcccaaggttgctacacagaccgttggtggagaggagttgccagtggctgggtggcgctcctacctgaatatggagttaacaatccccattttcgctaccaattcagactgtgaactcattgtcaaagctatgcaaggtcttcttaaggatggtaacccaattccaagtgcaattgctgctaattcaggcatttattctggcggcagcagcggcggctcaagcggaagtgaaacacctggaacttccgaaagcgctacgcctgaatcttctggtggatcttctggcggatcttccgcatgcgtcgacggcgacacaatgactaagcggaaacaccattcactgtacggccagattctccagagactggacactgctttcgcaaaggtgaaggcaaacagaggagccgcaggaatcgatggcgaaagtatcgccgaatttgagcaggatctcgaagccaatttggcacaacttaagagagacctcaaggagaagacatatgctcctcagccagtgcggcgagtctatattcctaaggcttccggtggtcagagaccactcggcattcctacagtcagagaccgggttgtgcagcaggccctgagactggtgctcgagcccgtgttcgaaccgctcttttgcgatagcagctatgggttcaggcctaagcgcagtgcccatcaagctctggatagggtcagcggccatttgagagagggttacaagtgggttgtggattgcgatctgaaatcttattttgatactatcccgcaggaggcccttattgaccgggtcgccgaggaagtcgccgatggcactgttctgaaactcatcagatcttttctgcaagctggagtaatgtctgaagggcagttgcagagaaccatagctggcacgccccagggtggtgtgatctcaccattgctcgccaacatctaccttcacggctttgatcagctcatggaggacagaggactgcgacttacaaggtacgctgacgacttcgtgatcctttgtcgaacccagagagcagcagaacgcgtgatgggtaatgtgcagtcttatcttgaaggccaactggggcttaccgtcaatcgcgagaagagcaaggtggtgcatttgtccgaagggttcgtattccttggatacgagtttgggacgtggggacgaaggcccggaccaaaggctattctgaggtttaaacagcggattagagagctgactcgccggaatcagaccatacctgtagacaaaatggtacgcgagcagctgaacccttaccttcaagggtgggctgggtactttgggtatggccaagtgaggcagcgcttcctggactacgataaatggattcggaggaggctgaggatggtccaattgcggtcctggcgacacatgaaaggcctgcacagggcaatgcgacagaaaggatggaaaggtcccctgcccgccgtctatgttaatatgagacggtggaggtcaagtgttcacagccttgttaactatgccctgggacccgattggatacgcggcttgggacttgtgtcccttgttgacttccaccggccaaccatggtgaccgtaacacgcgatatctga

SEQ ID NO: 1636 - DNA, 1842 bp, synthetic construct
  source 1..1842: mol_type = other DNA; note = FH-MCP-MG153-51V202R
atggactacaaagacgatgacgacaagtacccctatgatgtacctgattatgctgccagcaatttcacacagttcgtccttgtagacaacggcggcaccggggatgttacagtggccccgagcaatttcgcaaacggcgtagccgagtggatctcctctaatagcagaagccaggcttataaggttacatgctctgtaaggcagtcttccgcacaaaatagaaagtacacaatcaaggtcgaagtgcccaaggttgctacacagaccgttggtggagaggagttgccagtggctgggtggcgctcctacctgaatatggagttaacaatccccattttcgctaccaattcagactgtgaactcattgtcaaagctatgcaaggtcttcttaaggatggtaacccaattccaagtgcaattgctgctaattcaggcatttattctggcggcagcagcggcggctcaagcggaagtgaaacacctggaacttccgaaagcgctacgcctgaatcttctggtggatcttctggcggatcttccgcatgcgtcgacggcgacacaatgactaagcggaaacaccattcactgtacggccagattctccagagactggacactgctttcgcaaaggtgaaggcaaacagaggagccgcaggaatcgatggcgaaagtatcgccgaatttgagcaggatctcgaagccaatttggcacaacttaagagagacctcaaggagaagacatatgctcctcagccagtgcggcgagtctatattcctaaggcttccggtggtcagagaccactcggcattcctacagtcagagaccgggttgtgcagcaggccctgagactggtgctcgagcccgtgttcgaaccgctcttttgcgatagcagctatgggttcaggcctgggcgcagtgcccatcaagctctggatagggtcagcggccatttgagagagggttacaagtgggttgtggattgcgatctgaaatcttattttgatactatcccgcaggaggcccttattgaccgggtcgccgaggaagtcgccgatggcactgttctgaaactcatcagatcttttctgcaagctggagtaatgtctgaagggcagttgcagagaaccatagctggcacgccccagggtggtaggatctcaccattgctcgccaacatctaccttcacggctttgatcagctcatggaggacagaggactgcgacttacaaggtacgctgacgacttcgtgatcctttgtcgaacccagagagcagcagaacgcgtgatgggtaatgtgcagtcttatcttgaaggccaactggggcttaccgtcaatcgcgagaagagcaaggtggtgcatttgtccgaagggttcgtattccttggatacgagtttgggacgtggggacgaaggcccggaccaaaggctattctgaggtttaaacagcggattagagagctgactcgccggaatcagaccatacctgtagacaaaatggtacgcgagcagctgaacccttaccttcaagggtgggctgggtactttgggtatggccaagtgaggcagcgcttcctggactacgataaatggattcggaggaggctgaggatggtccaattgcggtcctggcgacacatgaaaggcctgcacagggcaatgcgacagaaaggatggaaaggtcccctgcccgccgtctatgttaatatgagacggtggaggtcaagtgttcacagccttgttaactatgccctgggacccgattggatacgcggcttgggacttgtgtcccttgttgacttccaccggccaaccatggtgaccgtaacacgcgatatctga

SEQ ID NO: 1637 - DNA, 1842 bp, synthetic construct
  source 1..1842: mol_type = other DNA; note = FH-MCP-MG153-51Quadmutant
atggactacaaagacgatgacgacaagtacccctatgatgtacctgattatgctgccagcaatttcacacagttcgtccttgtagacaacggcggcaccggggatgttacagtggccccgagcaatttcgcaaacggcgtagccgagtggatctcctctaatagcagaagccaggcttataaggttacatgctctgtaaggcagtcttccgcacaaaatagaaagtacacaatcaaggtcgaagtgcccaaggttgctacacagaccgttggtggagaggagttgccagtggctgggtggcgctcctacctgaatatggagttaacaatccccattttcgctaccaattcagactgtgaactcattgtcaaagctatgcaaggtcttcttaaggatggtaacccaattccaagtgcaattgctgctaattcaggcatttattctggcggcagcagcggcggctcaagcggaagtgaaacacctggaacttccgaaagcgctacgcctgaatcttctggtggatcttctggcggatcttccgcatgcgtcgacggcgacacaatgactaagcggaaacaccattcactgtacggccagattctccagagactggacactgctttcgcaaaggtgaaggcaaggagaggagccgcaggaatcgatggcgaaagtatcgccgaatttgagcaggatctcgaagccaatttggcacaacttaagagagacctcaaggagaagacatatgctcctcagccagtgcggcgagtctatattcctaaggctaggggtggtcagagaccactcggcattcctacagtcagagaccgggttgtgcagcaggccctgagactggtgctcgagcccgtgttcgaaccgctcttttgcgatagcagctatgggttcaggcctaagcgcagtgcccatcaagctctggatagggtcagcggccatttgagagagggttacaagtgggttgtggattgcgatctgaaatcttattttgatactatcccgcaggaggcccttattgaccgggtcgccgaggaagtcgccgatggcactgttctgaaactcatcagatcttttctgcaagctggagtaatgtctgaagggcagttgcagagaaccatagctggcacgccccagggtggtaggatctcaccattgctcgccaacatctaccttcacggctttgatcagctcatggaggacagaggactgcgacttacaaggtacgctgacgacttcgtgatcctttgtcgaacccagagagcagcagaacgcgtgatgggtaatgtgcagtcttatcttgaaggccaactggggcttaccgtcaatcgcgagaagagcaaggtggtgcatttgtccgaagggttcgtattccttggatacgagtttgggacgtggggacgaaggcccggaccaaaggctattctgaggtttaaacagcggattagagagctgactcgccggaatcagaccatacctgtagacaaaatggtacgcgagcagctgaacccttaccttcaagggtgggctgggtactttgggtatggccaagtgaggcagcgcttcctggactacgataaatggattcggaggaggctgaggatggtccaattgcggtcctggcgacacatgaaaggcctgcacagggcaatgcgacagaaaggatggaaaggtcccctgcccgccgtctatgttaatatgagacggtggaggtcaagtgttcacagccttgttaactatgccctgggacccgattggatacgcggcttgggacttgtgtcccttgttgacttccaccggccaaccatggtgaccgtaacacgcgatatctga

SEQ ID NO: 1638 - DNA, 2418 bp, synthetic construct
  source 1..2418: mol_type = other DNA; note = FH-MCP-MG169-1
atggactacaaagacgatgacgacaagtacccctatgatgtacctgattatgctgccagcaatttcacacagttcgtccttgtagacaacggcggcaccggggatgttacagtggccccgagcaatttcgcaaacggcgtagccgagtggatctcctctaatagcagaagccaggcttataaggttacatgctctgtaaggcagtcttccgcacaaaatagaaagtacacaatcaaggtcgaagtgcccaaggttgctacacagaccgttggtggagaggagttgccagtggctgggtggcgctcctacctgaatatggagttaacaatccccattttcgctaccaattcagactgtgaactcattgtcaaagctatgcaaggtcttcttaaggatggtaacccaattccaagtgcaattgctgctaattcaggcatttattctggcggcagcagcggcggctcaagcggaagtgaaacacctggaacttccgaaagcgctacgcctgaatcttctggtggatcttctggcggatcttccgcatgcgtcgacgctaagggcggaagctacataaactcaatcctcctcatggagaacgtgaagtacataatgacaaaccccgagattatactgaataacctggtgaaacactccaagatctccggctataagttcgaacgcttgtatcggatcctgtttaatgaacagatgttttaccaggcttatcagaggatcgcctccaagaaaggtaatatgacaagtggtaccgacggtaagaccgtggatggcatgtcaatcgagcggattgaacgactgatagccagcctgagagatgaaacatataagccacacccagcaaaacgggtgtacatcccgaaaaaaaacgggaaaaagagaccccttggaataccctctttcgaagacaaactcgtgcaggaagtggtgaggatgatcctggaggccgtatatgagggatactttgagagcacctctcacggattccgccccagaaaatcctgtcagactgctcttacctccatccggaatacttttcttggcacgaagtggttcattgaaggagacataaaggggttctttgataatatcgatcacaatgtcctcattgaaactctgcgcgaaaggattaaggacgatcgcttcctgagattgattaggaagtttctcaatgccggctatattgaggactggaagtttaataacacctactcagggactccgcagggcggaatcattagtcctattttggccaacatctacctggataggttcgacaaatatattgcagagtatatacagaagttcgataccggaaaaactagacctaagaaccgagagtacagaatttactcagaccgcaagagacggctcttggcaaaattcaatgccgagacagacgcagataaaagagaggaaatggctcaacggctcaaagagtacagcaggctcatgtacgagcacccttcagttgatgagatgacccctacgtataagagaatgaaatacgtgcggtatgctgatgacttcttgattggggtttgcggcagcaaagctgaatgcgaaatcatcaagaacgatattgctatgtttatgaaagagaagctcaagctcgagctctctgatgaaaagactcttatcactaatgctaaagacagggcactgttcttggggtacgaaattaccgttcgacagagccaaagtacaaagcgagacaaaaacggtatgctgaaacgcatgtttaatggcaaggtgatccttctgctgccccgagaagtcgcaagaaagcgactcctgtcttataatgcaatgacaatcatacaggtgaatgggaaggaagactggaaacctaagagcaggggagccatgaacaattgtaaaccagaagatattctcgccaaagtcaactccgagattcggggcttctataactactacgccattgcaaataacatctcaactctcggcaagagatttggctacgtcatgtcctatagtttttattgcacactggcccagaagctcaacatcagttaccccaaagtgataaaaaagtatagagaggggaaggactgtgtcattcgctataccgacgctaaggggcgagaaaggtgtaggatgctttataacgggggttttcaacagaaagagccaaccgctgacgccaaatgcgacaatttgccaaatcctttcgttatctcttctccatctctggtcgagcgccttaaagcagaagtatgtgagctttgcggagccaaaggtaaaaccgttatgcatcatgtgcggacgctgaagacactgacagagaacacagcttgggagagggctatgctgcaaatgcatcggaagagcctcgccgtatgtcctaattgctacgcccatatccacgatgatgatatctga

SEQ ID NO: 1639 - DNA, 2418 bp, synthetic construct
  source 1..2418: mol_type = other DNA; note = FH-MCP-MG169-1Q53R
atggactacaaagacgatgacgacaagtacccctatgatgtacctgattatgctgccagcaatttcacacagttcgtccttgtagacaacggcggcaccggggatgttacagtggccccgagcaatttcgcaaacggcgtagccgagtggatctcctctaatagcagaagccaggcttataaggttacatgctctgtaaggcagtcttccgcacaaaatagaaagtacacaatcaaggtcgaagtgcccaaggttgctacacagaccgttggtggagaggagttgccagtggctgggtggcgctcctacctgaatatggagttaacaatccccattttcgctaccaattcagactgtgaactcattgtcaaagctatgcaaggtcttcttaaggatggtaacccaattccaagtgcaattgctgctaattcaggcatttattctggcggcagcagcggcggctcaagcggaagtgaaacacctggaacttccgaaagcgctacgcctgaatcttctggtggatcttctggcggatcttccgcatgcgtcgacgctaagggcggaagctacataaactcaatcctcctcatggagaacgtgaagtacataatgacaaaccccgagattatactgaataacctggtgaaacactccaagatctccggctataagttcgaacgcttgtatcggatcctgtttaatgaaaggatgttttaccaggcttatcagaggatcgcctccaagaaaggtaatatgacaagtggtaccgacggtaagaccgtggatggcatgtcaatcgagcggattgaacgactgatagccagcctgagagatgaaacatataagccacacccagcaaaacgggtgtacatcccgaaaaaaaacgggaaaaagagaccccttggaataccctctttcgaagacaaactcgtgcaggaagtggtgaggatgatcctggaggccgtatatgagggatactttgagagcacctctcacggattccgccccagaaaatcctgtcagactgctcttacctccatccggaatacttttcttggcacgaagtggttcattgaaggagacataaaggggttctttgataatatcgatcacaatgtcctcattgaaactctgcgcgaaaggattaaggacgatcgcttcctgagattgattaggaagtttctcaatgccggctatattgaggactggaagtttaataacacctactcagggactccgcagggcggaatcattagtcctattttggccaacatctacctggataggttcgacaaatatattgcagagtatatacagaagttcgataccggaaaaactagacctaagaaccgagagtacagaatttactcagaccgcaagagacggctcttggcaaaattcaatgccgagacagacgcagataaaagagaggaaatggctcaacggctcaaagagtacagcaggctcatgtacgagcacccttcagttgatgagatgacccctacgtataagagaatgaaatacgtgcggtatgctgatgacttcttgattggggtttgcggcagcaaagctgaatgcgaaatcatcaagaacgatattgctatgtttatgaaagagaagctcaagctcgagctctctgatgaaaagactcttatcactaatgctaaagacagggcactgttcttggggtacgaaattaccgttcgacagagccaaagtacaaagcgagacaaaaacggtatgctgaaacgcatgtttaatggcaaggtgatccttctgctgccccgagaagtcgcaagaaagcgactcctgtcttataatgcaatgacaatcatacaggtgaatgggaaggaagactggaaacctaagagcaggggagccatgaacaattgtaaaccagaagatattctcgccaaagtcaactccgagattcggggcttctataactactacgccattgcaaataacatctcaactctcggcaagagatttggctacgtcatgtcctatagtttttattgcacactggcccagaagctcaacatcagttaccccaaagtgataaaaaagtatagagaggggaaggactgtgtcattcgctataccgacgctaaggggcgagaaaggtgtaggatgctttataacgggggttttcaacagaaagagccaaccgctgacgccaaatgcgacaatttgccaaatcctttcgttatctcttctccatctctggtcgagcgccttaaagcagaagtatgtgagctttgcggagccaaaggtaaaaccgttatgcatcatgtgcggacgctgaagacactgacagagaacacagcttgggagagggctatgctgcaaatgcatcggaagagcctcgccgtatgtcctaattgctacgcccatatccacgatgatgatatctga

SEQ ID NO: 1640 - DNA, 2418 bp, synthetic construct
  source 1..2418: mol_type = other DNA; note = FH-MCP-MG169-1S64R
atggactacaaagacgatgacgacaagtacccctatgatgtacctgattatgctgccagcaatttcacacagttcgtccttgtagacaacggcggcaccggggatgttacagtggccccgagcaatttcgcaaacggcgtagccgagtggatctcctctaatagcagaagccaggcttataaggttacatgctctgtaaggcagtcttccgcacaaaatagaaagtacacaatcaaggtcgaagtgcccaaggttgctacacagaccgttggtggagaggagttgccagtggctgggtggcgctcctacctgaatatggagttaacaatccccattttcgctaccaattcagactgtgaactcattgtcaaagctatgcaaggtcttcttaaggatggtaacccaattccaagtgcaattgctgctaattcaggcatttattctggcggcagcagcggcggctcaagcggaagtgaaacacctggaacttccgaaagcgctacgcctgaatcttctggtggatcttctggcggatcttccgcatgcgtcgacgctaagggcggaagctacataaactcaatcctcctcatggagaacgtgaagtacataatgacaaaccccgagattatactgaataacctggtgaaacactccaagatctccggctataagttcgaacgcttgtatcggatcctgtttaatgaacagatgttttaccaggcttatcagaggatcgccaggaagaaaggtaatatgacaagtggtaccgacggtaagaccgtggatggcatgtcaatcgagcggattgaacgactgatagccagcctgagagatgaaacatataagccacacccagcaaaacgggtgtacatcccgaaaaaaaacgggaaaaagagaccccttggaataccctctttcgaagacaaactcgtgcaggaagtggtgaggatgatcctggaggccgtatatgagggatactttgagagcacctctcacggattccgccccagaaaatcctgtcagactgctcttacctccatccggaatacttttcttggcacgaagtggttcattgaaggagacataaaggggttctttgataatatcgatcacaatgtcctcattgaaactctgcgcgaaaggattaaggacgatcgcttcctgagattgattaggaagtttctcaatgccggctatattgaggactggaagtttaataacacctactcagggactccgcagggcggaatcattagtcctattttggccaacatctacctggataggttcgacaaatatattgcagagtatatacagaagttcgataccggaaaaactagacctaagaaccgagagtacagaatttactcagaccgcaagagacggctcttggcaaaattcaatgccgagacagacgcagataaaagagaggaaatggctcaacggctcaaagagtacagcaggctcatgtacgagcacccttcagttgatgagatgacccctacgtataagagaatgaaatacgtgcggtatgctgatgacttcttgattggggtttgcggcagcaaagctgaatgcgaaatcatcaagaacgatattgctatgtttatgaaagagaagctcaagctcgagctctctgatgaaaagactcttatcactaatgctaaagacagggcactgttcttggggtacgaaattaccgttcgacagagccaaagtacaaagcgagacaaaaacggtatgctgaaacgcatgtttaatggcaaggtgatccttctgctgccccgagaagtcgcaagaaagcgactcctgtcttataatgcaatgacaatcatacaggtgaatgggaaggaagactggaaacctaagagcaggggagccatgaacaattgtaaaccagaagatattctcgccaaagtcaactccgagattcggggcttctataactactacgccattgcaaataacatctcaactctcggcaagagatttggctacgtcatgtcctatagtttttattgcacactggcccagaagctcaacatcagttaccccaaagtgataaaaaagtatagagaggggaaggactgtgtcattcgctataccgacgctaaggggcgagaaaggtgtaggatgctttataacgggggttttcaacagaaagagccaaccgctgacgccaaatgcgacaatttgccaaatcctttcgttatctcttctccatctctggtcgagcgccttaaagcagaagtatgtgagctttgcggagccaaaggtaaaaccgttatgcatcatgtgcggacgctgaagacactgacagagaacacagcttgggagagggctatgctgcaaatgcatcggaagagcctcgccgtatgtcctaattgctacgcccatatccacgatgatgatatctga

SEQ ID NO: 1641 - DNA, 2418 bp, synthetic construct
  source 1..2418: mol_type = other DNA; note = FH-MCP-MG169-1N112R
atggactacaaagacgatgacgacaagtacccctatgatgtacctgattatgctgccagcaatttcacacagttcgtccttgtagacaacggcggcaccggggatgttacagtggccccgagcaatttcgcaaacggcgtagccgagtggatctcctctaatagcagaagccaggcttataaggttacatgctctgtaaggcagtcttccgcacaaaatagaaagtacacaatcaaggtcgaagtgcccaaggttgctacacagaccgttggtggagaggagttgccagtggctgggtggcgctcctacctgaatatggagttaacaatccccattttcgctaccaattcagactgtgaactcattgtcaaagctatgcaaggtcttcttaaggatggtaacccaattccaagtgcaattgctgctaattcaggcatttattctggcggcagcagcggcggctcaagcggaagtgaaacacctggaacttccgaaagcgctacgcctgaatcttctggtggatcttctggcggatcttccgcatgcgtcgacgctaagggcggaagctacataaactcaatcctcctcatggagaacgtgaagtacataatgacaaaccccgagattatactgaataacctggtgaaacactccaagatctccggctataagttcgaacgcttgtatcggatcctgtttaatgaacagatgttttaccaggcttatcagaggatcgcctccaagaaaggtaatatgacaagtggtaccgacggtaagaccgtggatggcatgtcaatcgagcggattgaacgactgatagccagcctgagagatgaaacatataagccacacccagcaaaacgggtgtacatcccgaaaaaaagggggaaaaagagaccccttggaataccctctttcgaagacaaactcgtgcaggaagtggtgaggatgatcctggaggccgtatatgagggatactttgagagcacctctcacggattccgccccagaaaatcctgtcagactgctcttacctccatccggaatacttttcttggcacgaagtggttcattgaaggagacataaaggggttctttgataatatcgatcacaatgtcctcattgaaactctgcgcgaaaggattaaggacgatcgcttcctgagattgattaggaagtttctcaatgccggctatattgaggactggaagtttaataacacctactcagggactccgcagggcggaatcattagtcctattttggccaacatctacctggataggttcgacaaatatattgcagagtatatacagaagttcgataccggaaaaactagacctaagaaccgagagtacagaatttactcagaccgcaagagacggctcttggcaaaattcaatgccgagacagacgcagataaaagagaggaaatggctcaacggctcaaagagtacagcaggctcatgtacgagcacccttcagttgatgagatgacccctacgtataagagaatgaaatacgtgcggtatgctgatgacttcttgattggggtttgcggcagcaaagctgaatgcgaaatcatcaagaacgatattgctatgtttatgaaagagaagctcaagctcgagctctctgatgaaaagactcttatcactaatgctaaagacagggcactgttcttggggtacgaaattaccgttcgacagagccaaagtacaaagcgagacaaaaacggtatgctgaaacgcatgtttaatggcaaggtgatccttctgctgccccgagaagtcgcaagaaagcgactcctgtcttataatgcaatgacaatcatacaggtgaatgggaaggaagactggaaacctaagagcaggggagccatgaacaattgtaaaccagaagatattctcgccaaagtcaactccgagattcggggcttctataactactacgccattgcaaataacatctcaactctcggcaagagatttggctacgtcatgtcctatagtttttattgcacactggcccagaagctcaacatcagttaccccaaagtgataaaaaagtatagagaggggaaggactgtgtcattcgctataccgacgctaaggggcgagaaaggtgtaggatgctttataacgggggttttcaacagaaagagccaaccgctgacgccaaatgcgacaatttgccaaatcctttcgttatctcttctccatctctggtcgagcgccttaaagcagaagtatgtgagctttgcggagccaaaggtaaaaccgttatgcatcatgtgcggacgctgaagacactgacagagaacacagcttgggagagggctatgctgcaaatgcatcggaagagcctcgccgtatgtcctaattgctacgcccatatccacgatgatgatatctga

SEQ ID NO: 1642 - DNA, 2418 bp, synthetic construct
  source 1..2418: mol_type = other DNA; note = FH-MCP-MG169-1I234R
atggactacaaagacgatgacgacaagtacccctatgatgtacctgattatgctgccagcaatttcacacagttcgtccttgtagacaacggcggcaccggggatgttacagtggccccgagcaatttcgcaaacggcgtagccgagtggatctcctctaatagcagaagccaggcttataaggttacatgctctgtaaggcagtcttccgcacaaaatagaaagtacacaatcaaggtcgaagtgcccaaggttgctacacagaccgttggtggagaggagttgccagtggctgggtggcgctcctacctgaatatggagttaacaatccccattttcgctaccaattcagactgtgaactcattgtcaaagctatgcaaggtcttcttaaggatggtaacccaattccaagtgcaattgctgctaattcaggcatttattctggcggcagcagcggcggctcaagcggaagtgaaacacctggaacttccgaaagcgctacgcctgaatcttctggtggatcttctggcggatcttccgcatgcgtcgacgctaagggcggaagctacataaactcaatcctcctcatggagaacgtgaagtacataatgacaaaccccgagattatactgaataacctggtgaaacactccaagatctccggctataagttcgaacgcttgtatcggatcctgtttaatgaacagatgttttaccaggcttatcagaggatcgcctccaagaaaggtaatatgacaagtggtaccgacggtaagaccgtggatggcatgtcaatcgagcggattgaacgactgatagccagcctgagagatgaaacatataagccacacccagcaaaacgggtgtacatcccgaaaaaaaacgggaaaaagagaccccttggaataccctctttcgaagacaaactcgtgcaggaagtggtgaggatgatcctggaggccgtatatgagggatactttgagagcacctctcacggattccgccccagaaaatcctgtcagactgctcttacctccatccggaatacttttcttggcacgaagtggttcattgaaggagacataaaggggttctttgataatatcgatcacaatgtcctcattgaaactctgcgcgaaaggattaaggacgatcgcttcctgagattgattaggaagtttctcaatgccggctatattgaggactggaagtttaataacacctactcagggactccgcagggcggaaggattagtcctattttggccaacatctacctggataggttcgacaaatatattgcagagtatatacagaagttcgataccggaaaaactagacctaagaaccgagagtacagaatttactcagaccgcaagagacggctcttggcaaaattcaatgccgagacagacgcagataaaagagaggaaatggctcaacggctcaaagagtacagcaggctcatgtacgagcacccttcagttgatgagatgacccctacgtataagagaatgaaatacgtgcggtatgctgatgacttcttgattggggtttgcggcagcaaagctgaatgcgaaatcatcaagaacgatattgctatgtttatgaaagagaagctcaagctcgagctctctgatgaaaagactcttatcactaatgctaaagacagggcactgttcttggggtacgaaattaccgttcgacagagccaaagtacaaagcgagacaaaaacggtatgctgaaacgcatgtttaatggcaaggtgatccttctgctgccccgagaagtcgcaagaaagcgactcctgtcttataatgcaatgacaatcatacaggtgaatgggaaggaagactggaaacctaagagcaggggagccatgaacaattgtaaaccagaagatattctcgccaaagtcaactccgagattcggggcttctataactactacgccattgcaaataacatctcaactctcggcaagagatttggctacgtcatgtcctatagtttttattgcacactggcccagaagctcaacatcagttaccccaaagtgataaaaaagtatagagaggggaaggactgtgtcattcgctataccgacgctaaggggcgagaaaggtgtaggatgctttataacgggggttttcaacagaaagagccaaccgctgacgccaaatgcgacaatttgccaaatcctttcgttatctcttctccatctctggtcgagcgccttaaagcagaagtatgtgagctttgcggagccaaaggtaaaaccgttatgcatcatgtgcggacgctgaagacactgacagagaacacagcttgggagagggctatgctgcaaatgcatcggaagagcctcgccgtatgtcctaattgctacgcccatatccacgatgatgatatctga

SEQ ID NO: 1643 - DNA, 2418 bp, synthetic construct
  source 1..2418: mol_type = other DNA; note = FH-MCP-MG169-1Quadmutant
atggactacaaagacgatgacgacaagtacccctatgatgtacctgattatgctgccagcaatttcacacagttcgtccttgtagacaacggcggcaccggggatgttacagtggccccgagcaatttcgcaaacggcgtagccgagtggatctcctctaatagcagaagccaggcttataaggttacatgctctgtaaggcagtcttccgcacaaaatagaaagtacacaatcaaggtcgaagtgcccaaggttgctacacagaccgttggtggagaggagttgccagtggctgggtggcgctcctacctgaatatggagttaacaatccccattttcgctaccaattcagactgtgaactcattgtcaaagctatgcaaggtcttcttaaggatggtaacccaattccaagtgcaattgctgctaattcaggcatttattctggcggcagcagcggcggctcaagcggaagtgaaacacctggaacttccgaaagcgctacgcctgaatcttctggtggatcttctggcggatcttccgcatgcgtcgacgctaagggcggaagctacataaactcaatcctcctcatggagaacgtgaagtacataatgacaaaccccgagattatactgaataacctggtgaaacactccaagatctccggctataagttcgaacgcttgtatcggatcctgtttaatgaaaggatgttttaccaggcttatcagaggatcgccaggaagaaaggtaatatgacaagtggtaccgacggtaagaccgtggatggcatgtcaatcgagcggattgaacgactgatagccagcctgagagatgaaacatataagccacacccagcaaaacgggtgtacatcccgaaaaaaagggggaaaaagagaccccttggaataccctctttcgaagacaaactcgtgcaggaagtggtgaggatgatcctggaggccgtatatgagggatactttgagagcacctctcacggattccgccccagaaaatcctgtcagactgctcttacctccatccggaatacttttcttggcacgaagtggttcattgaaggagacataaaggggttctttgataatatcgatcacaatgtcctcattgaaactctgcgcgaaaggattaaggacgatcgcttcctgagattgattaggaagtttctcaatgccggctatattgaggactggaagtttaataacacctactcagggactccgcagggcggaaggattagtcctattttggccaacatctacctggataggttcgacaaatatattgcagagtatatacagaagttcgataccggaaaaactagacctaagaaccgagagtacagaatttactcagaccgcaagagacggctcttggcaaaattcaatgccgagacagacgcagataaaagagaggaaatggctcaacggctcaaagagtacagcaggctcatgtacgagcacccttcagttgatgagatgacccctacgtataagagaatgaaatacgtgcggtatgctgatgacttcttgattggggtttgcggcagcaaagctgaatgcgaaatcatcaagaacgatattgctatgtttatgaaagagaagctcaagctcgagctctctgatgaaaagactcttatcactaatgctaaagacagggcactgttcttggggtacgaaattaccgttcgacagagccaaagtacaaagcgagacaaaaacggtatgctgaaacgcatgtttaatggcaaggtgatccttctgctgccccgagaagtcgcaagaaagcgactcctgtcttataatgcaatgacaatcatacaggtgaatgggaaggaagactggaaacctaagagcaggggagccatgaacaattgtaaaccagaagatattctcgccaaagtcaactccgagattcggggcttctataactactacgccattgcaaataacatctcaactctcggcaagagatttggctacgtcatgtcctatagtttttattgcacactggcccagaagctcaacatcagttaccccaaagtgataaaaaagtatagagaggggaaggactgtgtcattcgctataccgacgctaaggggcgagaaaggtgtaggatgctttataacgggggttttcaacagaaagagccaaccgctgacgccaaatgcgacaatttgccaaatcctttcgttatctcttctccatctctggtcgagcgccttaaagcagaagtatgtgagctttgcggagccaaaggtaaaaccgttatgcatcatgtgcggacgctgaagacactgacagagaacacagcttgggagagggctatgctgcaaatgcatcggaagagcctcgccgtatgtcctaattgctacgcccatatccacgatgatgatatctga

SEQ ID NO: 1644 - DNA, 2418 bp, synthetic construct
  source 1..2418: mol_type = other DNA; note = FH-MCP-MG169-1 Rtdead
atggactacaaagacgatgacgacaagtacccctatgatgtacctgattatgctgccagcaatttcacacagttcgtccttgtagacaacggcggcaccggggatgttacagtggccccgagcaatttcgcaaacggcgtagccgagtggatctcctctaatagcagaagccaggcttataaggttacatgctctgtaaggcagtcttccgcacaaaatagaaagtacacaatcaaggtcgaagtgcccaaggttgctacacagaccgttggtggagaggagttgccagtggctgggtggcgctcctacctgaatatggagttaacaatccccattttcgctaccaattcagactgtgaactcattgtcaaagctatgcaaggtcttcttaaggatggtaacccaattccaagtgcaattgctgctaattcaggcatttattctggcggcagcagcggcggctcaagcggaagtgaaacacctggaacttccgaaagcgctacgcctgaatcttctggtggatcttctggcggatcttccgcatgcgtcgacgctaagggcggaagctacataaactcaatcctcctcatggagaacgtgaagtacataatgacaaaccccgagattatactgaataacctggtgaaacactccaagatctccggctataagttcgaacgcttgtatcggatcctgtttaatgaacagatgttttaccaggcttatcagaggatcgcctccaagaaaggtaatatgacaagtggtaccgacggtaagaccgtggatggcatgtcaatcgagcggattgaacgactgatagccagcctgagagatgaaacatataagccacacccagcaaaacgggtgtacatcccgaaaaaaaacgggaaaaagagaccccttggaataccctctttcgaagacaaactcgtgcaggaagtggtgaggatgatcctggaggccgtatatgagggatactttgagagcacctctcacggattccgccccagaaaatcctgtcagactgctcttacctccatccggaatacttttcttggcacgaagtggttcattgaaggagacataaaggggttctttgataatatcgatcacaatgtcctcattgaaactctgcgcgaaaggattaaggacgatcgcttcctgagattgattaggaagtttctcaatgccggctatattgaggactggaagtttaataacacctactcagggactccgcagggcggaatcattagtcctattttggccaacatctacctggataggttcgacaaatatattgcagagtatatacagaagttcgataccggaaaaactagacctaagaaccgagagtacagaatttactcagaccgcaagagacggctcttggcaaaattcaatgccgagacagacgcagataaaagagaggaaatggctcaacggctcaaagagtacagcaggctcatgtacgagcacccttcagttgatgagatgacccctacgtataagagaatgaaatacgtgcggtatgcttacgacttcttgattggggtttgcggcagcaaagctgaatgcgaaatcatcaagaacgatattgctatgtttatgaaagagaagctcaagctcgagctctctgatgaaaagactcttatcactaatgctaaagacagggcactgttcttggggtacgaaattaccgttcgacagagccaaagtacaaagcgagacaaaaacggtatgctgaaacgcatgtttaatggcaaggtgatccttctgctgccccgagaagtcgcaagaaagcgactcctgtcttataatgcaatgacaatcatacaggtgaatgggaaggaagactggaaacctaagagcaggggagccatgaacaattgtaaaccagaagatattctcgccaaagtcaactccgagattcggggcttctataactactacgccattgcaaataacatctcaactctcggcaagagatttggctacgtcatgtcctatagtttttattgcacactggcccagaagctcaacatcagttaccccaaagtgataaaaaagtatagagaggggaaggactgtgtcattcgctataccgacgctaaggggcgagaaaggtgtaggatgctttataacgggggttttcaacagaaagagccaaccgctgacgccaaatgcgacaatttgccaaatcctttcgttatctcttctccatctctggtcgagcgccttaaagcagaagtatgtgagctttgcggagccaaaggtaaaaccgttatgcatcatgtgcggacgctgaagacactgacagagaacacagcttgggagagggctatgctgcaaatgcatcggaagagcctcgccgtatgtcctaattgctacgcccatatccacgatgatgatatctga

SEQ ID NO: 1645 - DNA, 1968 bp, synthetic construct; identical to SEQ ID NO: 1521
  source 1..1968: mol_type = other DNA; note = FH-MCP-MG153-18WT

SEQ ID NO: 1646 - DNA, 1968 bp, synthetic construct; identical to SEQ ID NO: 1523
  source 1..1968: mol_type = other DNA; note = FH-MCP-MG153-18S59R

SEQ ID NO: 1647 - DNA, 1968 bp, synthetic construct; identical to SEQ ID NO: 1525
  source 1..1968: mol_type = other DNA; note = FH-MCP-MG153-18N71R

SEQ ID NO: 1648 - DNA, 1968 bp, synthetic construct; identical to SEQ ID NO: 1526
  source 1..1968: mol_type = other DNA; note = FH-MCP-MG153-18G119R

SEQ ID NO: 1649 - DNA, 1968 bp, synthetic construct; identical to SEQ ID NO: 1522
  source 1..1968: mol_type = other DNA; note = FH-MCP-MG153-18G161K

SEQ ID NO: 1650 - DNA, 1968 bp, synthetic construct; identical to SEQ ID NO: 1524
  source 1..1968: mol_type = other DNA; note = FH-MCP-MG153-18P242R

SEQ ID NO: 1651 - DNA, 1968 bp, synthetic construct; identical to SEQ ID NO: 1527
  source 1..1968: mol_type = other DNA; note = FH-MCP-MG153-18Pentamutant

SEQ ID NO: 1652 - DNA, 1968 bp, synthetic construct
  source 1..1968: mol_type = other DNA; note = FH-MCP-MG153-18_S59RG119R
atggactacaaagacgatgacgacaagtacccctatgatgtacctgattatgctgccagcaatttcacacagttcgtccttgtagacaacggcggcaccggggatgttacagtggccccgagcaatttcgcaaacggcgtagccgagtggatctcctctaatagcagaagccaggcttataaggttacatgctctgtaaggcagtcttccgcacaaaatagaaagtacacaatcaaggtcgaagtgcccaaggttgctacacagaccgttggtggagaggagttgccagtggctgggtggcgctcctacctgaatatggagttaacaatccccattttcgctaccaattcagactgtgaactcattgtcaaagctatgcaaggtcttcttaaggatggtaacccaattccaagtgcaattgctgctaattcaggcatttattctggcggcagcagcggcggctcaagcggaagtgaaacacctggaacttccgaaagcgctacgcctgaatcttctggtggatcttctggcggatcttccgcatgcgtcgacatgaggtcacaagagggaagacggcagcagaaagctcctgagggcgcgtacttgtgggaagagatggtgaagccatggggtactactggaggaccaagcccgtcttccgctcagggaggcgcgacccctcgcggggggcagggcagtggtttgatggagcaggtggttgagaggaggaacatgctggctgcgctgcgtcgggttgaaagaaatggaggcgcaccgggagtggacggcatacccaccgagaggctccgcgatcagattcgagccgagtggccaagaatcagggaagaacttcttgccggcacttaccgccctaaaccagttcgccgagtggaaatcccgaagcctaggggaggcaagagactgctgggtatccccacagcggtagaccgccttatccaacaagctctcctccaggtgctgactcctatctttgatcctcaatttagcgaagcctcttatggcttccgacccggcagacgggcccatgacgccgtgaggaaggccagacaatatgtcgaagagggttacgagtgggccgttgacttggatattgagaagtttttcgatcaggtgaaccatgacattttgatggcccgggtcgcgcgaaaggtgactgataagcgcgttctgactttgatccgcaggtatcttcaggcaggtgtcatggtcaacggcgtggttatcgagaccggggaaggcactcctcagggtggtcccttgagccccttactggcgaatatccttcttgatgaccttgacaaggagcttgaaaaacgggggcacaaattcgtgaggtacgcagacgactgtaatatatatgttaagagcaagcgcgctggggaacgagttatggctagtatcagaaaatttctgcaggaacggttgaagcttaaaattaacgagcagaagtctgccgtcgatcggccctggaagctgaaattcctgggtttctccatgcataaacgtaaaaccggtgaaattctcattcggcttgctccccaggctatagagcgtgttaaaggcaaaatccgggagattacagcacgaaacaagcctgtaagtatggccgagaggatcgaacgactgaatacatacttaggaggatggatcggttattttgcattggccgagacccccagcgtctttgaggagatcgaagggtggatgcgacgacggctccggatgtatttgtggaagcagtggaagcgggtccgtactcgctatcgcgaactcagagctcttggcttatctgaatgggtcgtgcaccagttcgctaacgcccgtaaaggtccctggcggatggcccacgggcctatgaatcgagccttaggcaacgcctattggcaaagccagggtcttatgtcactgaccgagcgataccagagcctgcgacaggctgatatctga

SEQ ID NO: 1653 - DNA, 1968 bp, synthetic construct
  source 1..1968: mol_type = other DNA; note = FH-MCP-MG153-18_G161KS59R
atggactacaaagacgatgacgacaagtacccctatgatgtacctgattatgctgccagcaatttcacacagttcgtccttgtagacaacggcggcaccggggatgttacagtggccccgagcaatttcgcaaacggcgtagccgagtggatctcctctaatagcagaagccaggcttataaggttacatgctctgtaaggcagtcttccgcacaaaatagaaagtacacaatcaaggtcgaagtgcccaaggttgctacacagaccgttggtggagaggagttgccagtggctgggtggcgctcctacctgaatatggagttaacaatccccattttcgctaccaattcagactgtgaactcattgtcaaagctatgcaaggtcttcttaaggatggtaacccaattccaagtgcaattgctgctaattcaggcatttattctggcggcagcagcggcggctcaagcggaagtgaaacacctggaacttccgaaagcgctacgcctgaatcttctggtggatcttctggcggatcttccgcatgcgtcgacatgaggtcacaagagggaagacggcagcagaaagctcctgagggcgcgtacttgtgggaagagatggtgaagccatggggtactactggaggaccaagcccgtcttccgctcagggaggcgcgacccctcgcggggggcagggcagtggtttgatggagcaggtggttgagaggaggaacatgctggctgcgctgcgtcgggttgaaagaaatggaggcgcaccgggagtggacggcatacccaccgagaggctccgcgatcagattcgagccgagtggccaagaatcagggaagaacttcttgccggcacttaccgccctaaaccagttcgccgagtggaaatcccgaagcctggaggaggcaagagactgctgggtatccccacagcggtagaccgccttatccaacaagctctcctccaggtgctgactcctatctttgatcctcaatttagcgaagcctcttatggcttccgacccaagagacgggcccatgacgccgtgaggaaggccagacaatatgtcgaagagggttacgagtgggccgttgacttggatattgagaagtttttcgatcaggtgaaccatgacattttgatggcccgggtcgcgcgaaaggtgactgataagcgcgttctgactttgatccgcaggtatcttcaggcaggtgtcatggtcaacggcgtggttatcgagaccggggaaggcactcctcagggtggtcccttgagccccttactggcgaatatccttcttgatgaccttgacaaggagcttgaaaaacgggggcacaaattcgtgaggtacgcagacgactgtaatatatatgttaagagcaagcgcgctggggaacgagttatggctagtatcagaaaatttctgcaggaacggttgaagcttaaaattaacgagcagaagtctgccgtcgatcggccctggaagctgaaattcctgggtttctccatgcataaacgtaaaaccggtgaaattctcattcggcttgctccccaggctatagagcgtgttaaaggcaaaatccgggagattacagcacgaaacaagcctgtaagtatggccgagaggatcgaacgactgaatacatacttaggaggatggatcggttattttgcattggccgagacccccagcgtctttgaggagatcgaagggtggatgcgacgacggctccggatgtatttgtggaagcagtggaagcgggtccgtactcgctatcgcgaactcagagctcttggcttatctgaatgggtcgtgcaccagttcgctaacgcccgtaaaggtccctggcggatggcccacgggcctatgaatcgagccttaggcaacgcctattggcaaagccagggtcttatgtcactgaccgagcgataccagagcctgcgacaggctgatatctga

SEQ ID NO: 1654 - DNA, 1968 bp, synthetic construct
  source 1..1968: mol_type = other DNA; note = FH-MCP-MG153-18_G161KN71R
atggactacaaagacgatgacgacaagtacccctatgatgtacctgattatgctgccagcaatttcacacagttcgtccttgtagacaacggcggcaccggggatgttacagtggccccgagcaatttcgcaaacggcgtagccgagtggatctcctctaatagcagaagccaggcttataaggttacatgctctgtaaggcagtcttccgcacaaaatagaaagtacacaatcaaggtcgaagtgcccaaggttgctacacagaccgttggtggagaggagttgccagtggctgggtggcgctcctacctgaatatggagttaacaatccccattttcgctaccaattcagactgtgaactcattgtcaaagctatgcaaggtcttcttaaggatggtaacccaattccaagtgcaattgctgctaattcaggcatttattctggcggcagcagcggcggctcaagcggaagtgaaacacctggaacttccgaaagcgctacgcctgaatcttctggtggatcttctggcggatcttccgcatgcgtcgacatgaggtcacaagagggaagacggcagcagaaagctcctgagggcgcgtacttgtgggaagagatggtgaagccatggggtactactggaggaccaagcccgtcttccgctcagggaggcgcgacccctcgcggggggcagggcagtggtttgatggagcaggtggttgagaggagcaacatgctggctgcgctgcgtcgggttgaaagaaggggaggcgcaccgggagtggacggcatacccaccgagaggctccgcgatcagattcgagccgagtggccaagaatcagggaagaacttcttgccggcacttaccgccctaaaccagttcgccgagtggaaatcccgaagcctggaggaggcaagagactgctgggtatccccacagcggtagaccgccttatccaacaagctctcctccaggtgctgactcctatctttgatcctcaatttagcgaagcctcttatggcttccgacccaagagacgggcccatgacgccgtgaggaaggccagacaatatgtcgaagagggttacgagtgggccgttgacttggatattgagaagtttttcgatcaggtgaaccatgacattttgatggcccgggtcgcgcgaaaggtgactgataagcgcgttctgactttgatccgcaggtatcttcaggcaggtgtcatggtcaacggcgtggttatcgagaccggggaaggcactcctcagggtggtcccttgagccccttactggcgaatatccttcttgatgaccttgacaaggagcttgaaaaacgggggcacaaattcgtgaggtacgcagacgactgtaatatatatgttaagagcaagcgcgctggggaacgagttatggctagtatcagaaaatttctgcaggaacggttgaagcttaaaattaacgagcagaagtctgccgtcgatcggccctggaagctgaaattcctgggtttctccatgcataaacgtaaaaccggtgaaattctcattcggcttgctccccaggctatagagcgtgttaaaggcaaaatccgggagattacagcacgaaacaagcctgtaagtatggccgagaggatcgaacgactgaatacatacttaggaggatggatcggttattttgcattggccgagacccccagcgtctttgaggagatcgaagggtggatgcgacgacggctccggatgtatttgtggaagcagtggaagcgggtccgtactcgctatcgcgaactcagagctcttggcttatctgaatgggtcgtgcaccagttcgctaacgcccgtaaaggtccctggcggatggcccacgggcctatgaatcgagccttaggcaacgcctattggcaaagccagggtcttatgtcactgaccgagcgataccagagcctgcgacaggctgatatctga

SEQ ID NO: 1655 - DNA, 1968 bp, synthetic construct
  source 1..1968: mol_type = other DNA; note = FH-MCP-MG153-18_G161KG119R
atggactacaaagacgatgacgacaagtacccctatgatgtacctgattatgctgccagcaatttcacacagttcgtccttgtagacaacggcggcaccggggatgttacagtggccccgagcaatttcgcaaacggcgtagccgagtggatctcctctaatagcagaagccaggcttataaggttacatgctctgtaaggcagtcttccgcacaaaatagaaagtacacaatcaaggtcgaagtgcccaaggttgctacacagaccgttggtggagaggagttgccagtggctgggtggcgctcctacctgaatatggagttaacaatccccattttcgctaccaattcagactgtgaactcattgtcaaagctatgcaaggtcttcttaaggatggtaacccaattccaagtgcaattgctgctaattcaggcatttattctggcggcagcagcggcggctcaagcggaagtgaaacacctggaacttccgaaagcgctacgcctgaatcttctggtggatcttctggcggatcttccgcatgcgtcgacatgaggtcacaagagggaagacggcagcagaaagctcctgagggcgcgtacttgtgggaagagatggtgaagccatggggtactactggaggaccaagcccgtcttccgctcagggaggcgcgacccctcgcggggggcagggcagtggtttgatggagcaggtggttgagaggagcaacatgctggctgcgctgcgtcgggttgaaagaaatggaggcgcaccgggagtggacggcatacccaccgagaggctccgcgatcagattcgagccgagtggccaagaatcagggaagaacttcttgccggcacttaccgccctaaaccagttcgccgagtggaaatcccgaagcctaggggaggcaagagactgctgggtatccccacagcggtagaccgccttatccaacaagctctcctccaggtgctgactcctatctttgatcctcaatttagcgaagcctcttatggcttccgacccaagagacgggcccatgacgccgtgaggaaggccagacaatatgtcgaagagggttacgagtgggccgttgacttggatattgagaagtttttcgatcaggtgaaccatgacattttgatggcccgggtcgcgcgaaaggtgactgataagcgcgttctgactttgatccgcaggtatcttcaggcaggtgtcatggtcaacggcgtggttatcgagaccggggaaggcactcctcagggtggtcccttgagccccttactggcgaatatccttcttgatgaccttgacaaggagcttgaaaaacgggggcacaaattcgtgaggtacgcagacgactgtaatatatatgttaagagcaagcgcgctggggaacgagttatggctagtatcagaaaatttctgcaggaacggttgaagcttaaaattaacgagcagaagtctgccgtcgatcggccctggaagctgaaattcctgggtttctccatgcataaacgtaaaaccggtgaaattctcattcggcttgctccccaggctatagagcgtgttaaaggcaaaatccgggagattacagcacgaaacaagcctgtaagtatggccgagaggatcgaacgactgaatacatacttaggaggatggatcggttattttgcattggccgagacccccagcgtctttgaggagatcgaagggtggatgcgacgacggctccggatgtatttgtggaagcagtggaagcgggtccgtactcgctatcgcgaactcagagctcttggcttatctgaatgggtcgtgcaccagttcgctaacgcccgtaaaggtccctggcggatggcccacgggcctatgaatcgagccttaggcaacgcctattggcaaagccagggtcttatgtcactgaccgagcgataccagagcctgcgacaggctgatatctga

SEQ ID NO: 1656 - DNA, 1968 bp, synthetic construct
  source 1..1968: mol_type = other DNA; note = FH-MCP-MG153-18_Tetramutant
atggactacaaagacgatgacgacaagtacccctatgatgtacctgattatgctgccagcaatttcacacagttcgtccttgtagacaacggcggcaccggggatgttacagtggccccgagcaatttcgcaaacggcgtagccgagtggatctcctctaatagcagaagccaggcttataaggttacatgctctgtaaggcagtcttccgcacaaaatagaaagtacacaatcaaggtcgaagtgcccaaggttgctacacagaccgttggtggagaggagttgccagtggctgggtggcgctcctacctgaatatggagttaacaatccccattttcgctaccaattcagactgtgaactcattgtcaaagctatgcaaggtcttcttaaggatggtaacccaattccaagtgcaattgctgctaattcaggcatttattctggcggcagcagcggcggctcaagcggaagtgaaacacctggaacttccgaaagcgctacgcctgaatcttctggtggatcttctggcggatcttccgcatgcgtcgacatgaggtcacaagagggaagacggcagcagaaagctcctgagggcgcgtacttgtgggaagagatggtgaagccatggggtactactggaggaccaagcccgtcttccgctcagggaggcgcgacccctcgcggggggcagggcagtggtttgatggagcaggtggttgagaggaggaacatgctggctgcgctgcgtcgggttgaaagaaggggaggcgcaccgggagtggacggcatacccaccgagaggctccgcgatcagattcgagccgagtggccaagaatcagggaagaacttcttgccggcacttaccgccctaaaccagttcgccgagtggaaatcccgaagcctaggggaggcaagagactgctgggtatccccacagcggtagaccgccttatccaacaagctctcctccaggtgctgactcctatctttgatcctcaatttagcgaagcctcttatggcttccgacccaagagacgggcccatgacgccgtgaggaaggccagacaatatgtcgaagagggttacgagtgggccgttgacttggatattgagaagtttttcgatcaggtgaaccatgacattttgatggcccgggtcgcgcgaaaggtgactgataagcgcgttctgactttgatccgcaggtatcttcaggcaggtgtcatggtcaacggcgtggttatcgagaccggggaaggcactcctcagggtggtcccttgagccccttactggcgaatatccttcttgatgaccttgacaaggagcttgaaaaacgggggcacaaattcgtgaggtacgcagacgactgtaatatatatgttaagagcaagcgcgctggggaacgagttatggctagtatcagaaaatttctgcaggaacggttgaagcttaaaattaacgagcagaagtctgccgtcgatcggccctggaagctgaaattcctgggtttctccatgcataaacgtaaaaccggtgaaattctcattcggcttgctccccaggctatagagcgtgttaaaggcaaaatccgggagattacagcacgaaacaagcctgtaagtatggccgagaggatcgaacgactgaatacatacttaggaggatggatcggttattttgcattggccgagacccccagcgtctttgaggagatcgaagggtggatgcgacgacggctccggatgtatttgtggaagcagtggaagcgggtccgtactcgctatcgcgaactcagagctcttggcttatctgaatgggtcgtgcaccagttcgctaacgcccgtaaaggtccctggcggatggcccacgggcctatgaatcgagccttaggcaacgcctattggcaaagccagggtcttatgtcactgaccgagcgataccagagcctgcgacaggctgatatctga

SEQ ID NO: 1657 - DNA, 1929 bp, synthetic construct; identical to SEQ ID NO: 1528
  source 1..1929: mol_type = other DNA; note = FH-MCP-MG153-20WT

SEQ ID NO: 1658 - DNA, 1929 bp, synthetic construct; identical to SEQ ID NO: 1529
  source 1..1929: mol_type = other DNA; note = FH-MCP-MG153-20E43R

SEQ ID NO: 1659 - DNA, 1929 bp, synthetic construct; identical to SEQ ID NO: 1530
  source 1..1929: mol_type = other DNA; note = FH-MCP-MG153-20N55R

SEQ ID NO: 1660 - DNA, 1929 bp, synthetic construct
  source 1..1929: mol_type = other DNA; note = FH-MCP-MG153-20D103R
atggactacaaagacgatgacgacaagtacccctatgatgtacctgattatgctgccagcaatttcacacagttcgtccttgtagacaacggcggcaccggggatgttacagtggccccgagcaatttcgcaaacggcgtagccgagtggatctcctctaatagcagaagccaggcttataaggttacatgctctgtaaggcagtcttccgcacaaaatagaaagtacacaatcaaggtcgaagtgcccaaggttgctacacagaccgttggtggagaggagttgccagtggctgggtggcgctcctacctgaatatggagttaacaatccccattttcgctaccaattcagactgtgaactcattgtcaaagctatgcaaggtcttcttaaggatggtaacccaattccaagtgcaattgctgctaattcaggcatttattctggcggcagcagcggcggctcaagcggaagtgaaacacctggaacttccgaaagcgctacgcctgaatcttctggtggatcttctggcggatcttccgcatgcgtcgacatgggtgaggtgagggtgaagcccgggggcactcctagagggcgcagcatcgaccggcaggatctgaaactcattctgcggcgggagaagtacagaatggacttaatggaacagatgctttccagagagaatatgttgcaggccctgcgcagggtggaagcaaacaaaggggcagccggtatcgactccgtatcaactaggcagctgagggcacacgtggtccagcactgggaaacaactaaggcgaaactgctggccgggacatataagccctcacccgttaggcgcgttgagatacctaagccaaggggcggtgtacgactgttaggaatcccaactgtgatggatagactcatacagcaggctatccttcaggtcctgacaccaatcttcgacccaacattttctcctcattcttatggatttagacccaaacgacggggccacgatgccgttcgccaggcacaggagtatattcgggaggggtaccggtacgttgtggacattgatctggaaaagttcttcgaccgagtcaaccatgatatattgatgtcccgggtcgcccggaaggtgaaagacaagcgagtgcttaagctcattagggcatacctcaaagccggcattatggccgagggaatccgagtcagatctgaagaaggtaccccgcagggtggtcccctgtccccccttctcgccaacatcctcctggatgacctggataaggagctcgaaagaaggcaactgcggttcgtgcgttatgctgacgattgtaatatctatgtcaagacccgcagagctggggagcgcgtgaagcggtccattacaaagtacctggagaaaaaattaaaactcaaggtcaatgaagcgaagagtgccgtggaccgtccttggaagaggaaattcctcgggttctcttttacgtttcataaggaagcgcggatcaggatcgcgcctaagtccctgaaaagggtgaaagacaaaattcggagtctgacaaggggtaatcacctgacctccatggaaaccattatcgaggacttgaatagatacctgatgggttggatggggtattacgcccttatggacaccccatctacattaaaagcccttgatgagtggatccgtcggcggttgaggctggtcctttggtctcgttggaaacgcgtccgaacaaggtatcgcatgttacgggctttggggctgcccgaacgcgatgttcacaagcttgcgaatacacgcaagggcgcgtggagaacttccaaaaccccccagatgcataaagctctcggtatagcgtattggaagagccaagggctcatgtccctcaccgaacgatatttcgaaatcagacagggttggaggacagcagatatctga

SEQ ID NO: 1661 - DNA, 1929 bp, synthetic construct; identical to SEQ ID NO: 1532
  source 1..1929: mol_type = other DNA; note = FH-MCP-MG153-20P226R

SEQ ID NO: 1662 - DNA, 1929 bp, synthetic construct; identical to SEQ ID NO: 1533
  source 1..1929: mol_type = other DNA; note = FH-MCP-MG153-20Quadmutant

SEQ ID NO: 1663 - DNA, 4035 bp, synthetic construct
  source 1..4035: mol_type = other DNA; note = FH-MCP-MG140-59
atggactacaaagacgatgacgacaagtacccctatgatgtacctgattatgctgccagcaatttcacacagttcgtccttgtagacaacggcggcaccggggatgttacagtggccccgagcaatttcgcaaacggcgtagccgagtggatctcctctaatagcagaagccaggcttataaggttacatgctctgtaaggcagtcttccgcacaaaatagaaagtacacaatcaaggtcgaagtgcccaaggttgctacacagaccgttggtggagaggagttgccagtggctgggtggcgctcctacctgaatatggagttaacaatccccattttcgctaccaattcagactgtgaactcattgtcaaagctatgcaaggtcttcttaaggatggtaacccaattccaagtgcaattgctgctaattcaggcatttattctggcggcagcagcggcggctcaagcggaagtgaaacacctggaacttccgaaagcgctacgcctgaatcttctggtggatcttctggcggatcttccgcatgcgtcgacctgcccagaagcactggggcctcagcccctccccgcaccctgacagatcgcggaggacccagtggcggaaatcccactcttagcctcgtatatcctttgacggacctgacctgtcctctctgcggctgcgtcccaaagggccagaaagtcctggtgagccacctgggatctgcccatcaggtaacgaatctcacatgggaatgtgggagatgccacaagggatgggagtcaaaccgagctgtggcggcccactactccaggtgtcgcggaagacccgatgctgaaccagcgaggctcgacactggtactactgagccagacgagcaagtcggcgtggacggtccaagcggaggagggggaggagagccaccaccagtcgctgatgcatccgccgggggaaggccacaccttgaggtaagcccaggtcccacccggccagctcggcattccggccccggaagccccagagagcctgactcaaggggcgtattgtgtgatgagtgtgggcgcagtttcggaactttggcgggcaagcaactccatcgaaagagaaagcacgtggctgagtataacgcttctttgcccgaacaaagcactcgaaacgtgttccccgaggaggtcttgcgggatctggcagccgccgcgctggactatcctggccgcggggtgacagggctcggcgttgggcagtttatagcggaaaggtttcctcggtacagggtggccgacataaacgccctgcgaaaacgcccaaaataccgacagatcgaaaaccagctgcgggctgatcggctcgccgccgcctgtatgcccggcggtgaagctgggggagttgacaaccgagatgcccgacctgcacgggctcccacggtgcttgtccgccccatgggaccagccgaatctgccttggaagaccaagcttgggacttctaccaagcagtcgtggacgggggtgacattgataccctttatcggggtctgttcgatttggcgaatggacaacggccatccaggggtagatcacagaaccgacacgacaatggggaacggcccccagctgctacgaatagaacgcagcggaagagagaacgctacagactgcaccagaggctttttgcgaagaggccgtctgatctgatgaatgagctccgaaagccgggcaccgccggacaagaggtgcttccagacacagcacaagtacagcaggtgtactctgagcgctttgggagtgcctccccacgagacgaggcaccttatcgagttaaacccggtgccgctgaaggccctctctctccctttacaattgacgaggtgcggggagttctgcggtctatgcagctgtcctctgccgctggccctgatggagttactgtcaaggatctggtcacttggggcgttagagtcattcaccccatagttaatgcctttttgcacaggggcaaaattcccgccgacctccgctcaaacaggacctccctgatcccaaagaagccggaccctcgagacgtcaacgatttccgcccaattaccataggaccaatcctgaaccgattctacgccaaacttctcgcggaacgccttagaagtacagtgacactcgacccaagacagaaggcatttgtgccagtcgatggttgctccgagcatctgtttgtcgtgggggaggtgctggacctgtgcaggaagcgccgcaaagagtgtaatatggtcttcctggatcttgcaaaggccttcgacatggtgtcccaccacagcctgctgagggccctggcacggcatggggttggtgcgagatttgtagacattgtgcgcgacttgtacaccggtgttagcacaaccatccggggcagacagggccctaccaccccaattcagatggctcggggtgtgaaacaggggtgccctatgtccccaatcctgttcaatctgatgatggacgagctgctggaatctgtgggcgataggcatgaacttagaccagcccggaatctgcccggcatcaacgctttggcattcgccgatgatctggtgctcgccagcggcacagcccacggtacagaatggcttctcgagaaagcccgcttgttttttggggcccgcagtatggccgtgaacgcagagaaatcacatgtgatccgcatgacgttgcctccgagatctgaggccgtcaaagtagccgagggcagtactttcaaattcggggaaaaacctctccagaatcgaaaggtgaccgaggtggtgaagtatttgggacttcagctgtctcctttggggactcccaagtttaaggaaacacagttcctgattgatctgggagtggttagaggcagcgcacttaagcccgcgcaaaaaatgacgttgcttagacggaacgtgctgcccagttacatgcactccctccgcttgtccaaggtgtcagatcagttggtgcgaagactcgatggggagctccgacgcgcggctaaacgaatcttgcatctgcctccgggcacccctagtgatttcttctacttgagccccaaggacggcgggctggggttgcctaatattcgggaagcagtggggctgtctaggttgaagagaatcacatcattgagggcatctgaggatgccgtcgtacggtcttatgcagaaaccagccatcctctggaacatgaatgtcgattttgggtaagggccctcggcatcaccgacacaagctttcgaggcttgaggcacgcaaaggctgctcttcctggccagcgggcagccagatacagggaaacccctctgggcgctatgttcgcagccgataaatctagggcagggcacccttggattaaagagcccagactgctgagtggaggcgattatgttctcgctgcgcacatgctctcagagaccctcccgaccagggtttgtcttgctcggggtcagaccatcgctaccaaaacatgccgaaggtgtagggagaccgacgagactatggcacatgtcttgaacgggtgcagcggcaccagacgcgctcagatctcccgccacaattgggtgtgcgatacactgagacaggcccttatgaagagcgggtcagaaacagaaactgtatccgttctgccggaactgagggtgcgggtcgggggcgaggagtatagacctgatcttactgtgatcaggggccccatcgctacagtggtggacgtcgccgttgcttacgacagccgggcagagaatatatgcaggaggtaccatgataaacttcggaagtatgacattatcagaggcccgttgtcagaccagctgaacgagagacccggtgcaaccccgattaccgaagtccgcgtcgaggctctcgtggtgggcagtcgcggactgcttatgcctgagacatgccagcgccccctttcccgactgggcctgagcaagtcccttgcctatactctccaggagggaactgttcggggtagtgcaggagtgtggcgctgcttcagggccagagatatctaa

SEQ ID NO: 1664 - DNA, 4575 bp, synthetic construct
  source 1..4575: mol_type = other DNA; note = FH-MCP-MG140-60
atggactacaaagacgatgacgacaagtacccctatgatgtacctgattatgctgccagcaatttcacacagttcgtccttgtagacaacggcggcaccggggatgttacagtggccccgagcaatttcgcaaacggcgtagccgagtggatctcctctaatagcagaagccaggcttataaggttacatgctctgtaaggcagtcttccgcacaaaatagaaagtacacaatcaaggtcgaagtgcccaaggttgctacacagaccgttggtggagaggagttgccagtggctgggtggcgctcctacctgaatatggagttaacaatccccattttcgctaccaattcagactgtgaactcattgtcaaagctatgcaaggtcttcttaaggatggtaacccaattccaagtgcaattgctgctaattcaggcatttattctggcggcagcagcggcggctcaagcggaagtgaaacacctggaacttccgaaagcgctacgcctgaatcttctggtggatcttctggcggatcttccgcatgcgtcgacattagcagcactgactcacatagatccgttccgcctcagcccaccgaggaacggctgagaaccgcaaggggagccacaagcggatctaggaccttgtgctcacagagtgggagcccggctgggaattatgctggctccgatgaaaatttcatccgagatacctccgcctccgcgcgaggaaccagctccttgcggaaccagatgcctgtgtgcctgttgtgtggcattcagtgtaaaaatgtggccggcctcaaacgccatgctgctcgccacgcacggcacccaaacatcacccctctgaatcacctttacggggctttcgggtttagctgtcaagagtgtggcgccgatttcagctcccaaagaggactgtctcagcattgtaggagaaagcaccccaactcctacaaccagacacgactggcctccatgccaacctccaaatattactggagtagggacgaggatcatcgcctgctcgccgcagcaagcagcatttgccagtcaagtgccaatctcagtgagctgcattcccgcctgcgggaacacttcccgagccgatcaaaggaagctattaaaaagcgattgcagaaacttcactggaggcagcagactatcctcgacaacgcaaccccaggcgcagtgggcagcccagacgatctgggaagcgggggccggtcaccaatcagcccttctccccttatccaggagaccgctcacagcccactgataaatgctgatacagaggttcttgaccatcccgacaatcaacatgccgtgtcttctatccctatacagcaaggcggatctaggtccatggagcatctggggagtggaatacggtccccaggcagtctcccagtgctttccagccgaagtcagaatacacctaacgctgaccacgactcattttgccctcgcctgagcgacccacccggagttgtcagtctcagtatacataatcaggggatcacccagcccacgcctagcaacaggctgtctgccctgtcaggtgtagtgtcacctgcacctatctgcatctccgagagtccaccccagtaccagacaacagaacccactatgtccacaccctcttcttccatgacactgcacgcaggggtggcaaccattgcttctgacgatcagagcggggctgcaactatgctgcagacggatatttccttgccagcgcaaggtgacaccaacgagcaaagcggcgggtacatcaacatggaatctccggtcttccctacggccatggcggaactcctccagactccaagtcacctgtcaccctctgatccagtgtgcttccaaaacatacctctgagcttcctgcctttggcccaacccccttccatatgggacgattctggtgcgcatttctcaatggagaccccgccaatctcttgcccagaagtggctatctcaccacttagtccgagtttgaaccttttgctcagtgcccgcgagcagctgactcttgcccccgagaatgataaattccgggagctgctgccagaagtcagcaagaccattttggagtctgacgacctgagatcacttcaaaatagtctggaagactttgctcaacaccacttccccgccacctggaaacggagaatccatcgcacccagtcaaggtcttccatcatgaacaataagactttccggaggttgcagtacagccacgtgcaaagactttatagaaaccgaagaagcgatgccgcaaagacaatcctggatgggaggtggcggaatgccttccttgagaataatgatattttccctaactttacgagctattggaaagaaacgctttccggtgacagccccacagacgataggccaccacgaatggtgcttccagagattacacggcttatcgatccgattacccccgaggaggtcagcagcgccatcacgggcctgatgggttccgcctccggtatggatcacattactccaattcagcttcgacagatgccctctacttctctggctgctttctttaatcttatgctcgcatcaggatacatccctcggagcttgaataccgctcgcctgacattcgttcctaagacttcaaatcccctgagtccttctgacttcaggcccatctctgtaacatctactctgacacgctgttttcataaaatcttgtttaacagatggtcacccaattttcctagtgataggggtcagtttggtttcctgcaacaggatggttgttttgaaattacctccattctgcacgcgattttgcggaacacacatgcgcacagcaaggacatttgcatagcttttgcggacatttccaaggccttcgatagggtgagccactcttctattcttcgcaacgcaagctcatttggcgcacctactctcctcatccattatctcacacacttctacacctcaggtaccacttatcttgacggcgaacccatttcatgccgaaggggcgtccgccaaggcgatcctctttccccacttctcttcatcatggccctcgacgaagccctgcaaaactccacagatttcctctttcacacccctgccggaccacttccccacctggcatatgcagacgattgcatcctgctgtcccattcacccgagtccctcacccgaaggctctaccagtttaacaaagagcttcattctctgggactgtctctcaatatactgaagaccagcacgttgcatatctgtgctaacggccgcgccaaatccgtcgcactggataccagccccatatttatcaacagtgaacccctgcccgttatttctcctgacagtactattaacatattgggcatcccgtttagctggagcggcaaaagccccaccgatgtctctctgaggtgctcagatatgttgaacgagctgagacaggcccccttgaagcctcagcagcggatcgacatactgcagcactttctgatgccaagacttatccactgcctgtcactgggagctgtgcacaaaaatactttgcgcaaacttgacgtgaaaattaggcagaacatcaaggcttggctccgacttcccaaggacacggctacagctttcttttacgcaagtgtcgaggacaatggactggggatccccaacctctctacacgggtacctttgaaccgccgaagacgactcgaaaggcacctgtcatctcccaatccaactctcgcatgggccctgcgggacccgaccagtgcgccgtcccattatctggccacgtctacaatttctgttgccggaaaccccatatccgacctgaagtttgcaacaactgcttgggctaatgctctttactcatctgtagacagtgccccattgagacatgtatccaccacccctacttcccacgattggctcagaaacccccagagaatcttcccccgattgtatatccgcgcaatacagttgcgcgccggggtgttgtccactaagtccaggcgagccagggggcacagaatccccgccgaggacataaagtgccgggcctgcgcgacacctgagactcttagccatattctccagacatgtccactgacccacgacgcccggtgcagacggcataacgaaattgtgcacatgactattagaaagagttccaaacggcacatcacaacgatgctggagcctcatatccctacagcgcgaagcttccttaagcctgatctccttgtggtctctaacacaaacgtttttgttgccgatgtcgccgtctgtgatccgccgagaatggaaagaacttaccaggagaagtcagccaagtacggggcaattagcaatcagaccctccacgctgtgaataggtttcacccaggggtgcggacgatcatccaatgtcctctgatcttctctaatcgcggacatattcacccaaccagtcagaagcatctccttcgcctgggcttcactagactcgacatcagtgacctctgtgtggccacaattcagggctccctgaagacttttgacacctatatgcgcggctctggaaccgccgatatctaa

SEQ ID NO: 1665 - DNA, 3756 bp, synthetic construct
  source 1..3756: mol_type = other DNA; note = FH-MCP-MG140-61
atggactacaaagacgatgacgacaagtacccctatgatgtacctgattatgctgccagcaatttcacacagttcgtccttgtagacaacggcggcaccggggatgttacagtggccccgagcaatttcgcaaacggcgtagccgagtggatctcctctaatagcagaagccaggcttataaggttacatgctctgtaaggcagtcttccgcacaaaatagaaagtacacaatcaaggtcgaagtgcccaaggttgctacacagaccgttggtggagaggagttgccagtggctgggtggcgctcctacctgaatatggagttaacaatccccattttcgctaccaattcagactgtgaactcattgtcaaagctatgcaaggtcttcttaaggatggtaacccaattccaagtgcaattgctgctaattcaggcatttattctggcggcagcagcggcggctcaagcggaagtgaaacacctggaacttccgaaagcgctacgcctgaatcttctggtggatcttctggcggatcttccgcatgcgtcgactgccgggcaaggccctcttgtcatctgactgagtgctcagaggcccttcccggcgaagctaaggctagactgggtccagctgggctgaccaccctgtcaggtttctgttatcatgtggctacaacaaatacacagaacgaggaagcagcgcctgtggcgcccgagagcaacaatagaagcgagggcggcgcaagtgacgacgtcagcctcgccaggtgccctgattgtcttagacagtttgccacaaaacgcgggctctcaatccatagacgcagtgctcaccccgaggagtatcatttggagaatgtcccaaaggaacgaaagaaagctcggtgggatcatgaggagatggtgctccttgcccggcgggaaattgatctgcaggctgccgggggcaggcctaacgttaaccaggttcttgccgatgtgtttccatcccgaacgttggaggcgatcaagggcgttaggaaacgccctgcatacaaggagcttttgagaaatctgaccagttctatcggcactcaagatggcgcttcatctctgccctcagagggccccagccttggaagtgaaacccagcaggcgtccagtgaggaatggacccacgattgggtaagcgacctcaagaaggctgtggttgaatctggtatcaagctggatggctttagacttgatgacatagagccaggagtccccagtgattgggtgagagacgcagtagacagcaactacgaagcatggcttcccagccctaccgaggcaggacggaaccaaagagctcgcgctccggaaaaagaaccagagggtgccagaacaaagagacgagcacagtacgcccaggtccagcggtgctatgatcgggacaggactagatgcgcccagcagatcattgccggcaattggcgcgagcccccagcatccctccccatgtctgtccaggagcccttctggagggacctgttcgagaccccaagtgtgcctaatagccagtccctgccgatcgtgggagaaatgcattgggaattgacacaccccattacagccgaggacgttgtgcgagcattgaaaaaaatgaaagatggagtaccactgccagatgggaggaagctgcaggatgtgaaggccattgccgctgacgagctggctggtcacttcaatctctggctgttgactgggtgcctgcctgaaaggctgcggcgagggcagaccgtcctcctccctaaatgtgctgaggccggagatcccgccaaatataggcccatcacgatgagcgacatcgtggttcggtgttttcaccggatccttgcccaacgcatggagatccacctgccgttttccacgcggcaggaagctttccgctccggcgacggcgtggccaattccgtatggtttattcaggccgttatcaaacaccaccaagattccttgcgaccactcaatgtggccttcgtggacgtgaaaaaagcttttgatagcgtgtcccatcaaagcatcctggtcgccgccgctcgactcggtgttccgcctcccttccttggatacattagggaactgtactcaaatgcagtcacgaccctgaggattggtcctgacgtcagcggaccaattaggctgggcaagggtgtacgacagggggaccccctctctgtgcacctgtttaacgctgtaattgacatgtgcctcgcgggcctcgatcactccctcggcatcgaggtctccgaccttagggtaaatcacggcgccttcgctgatgacatagctttgttcgctgcaaccccgcgaggcttgcaggcgctggcaagcgaactggaatttcaactttctatgtgcggcctctccatatcttctgggcctcatggaaaaagcgtgtctatgaggctggacattgacggtaaggctaagaaatgggtgattaatcccctccctttcctgagaatagcaaacgagacagtcccaagcgtctcactctcccaagtttatcgatatttgggggtggacgtgagtcctcggcggacaaaagccaacgtggctcagatgctgagagacggactggctagtatttcaagcgcaccccttaagccacagcaacgcctgtatattgcaacctatcacctccttcctaagtgccaccatcagcttgcgctctccccttctcttgctaagtacttgcgatggctggacaggacagtgtgttctgccctcaggagctggctgaagctgccgaaggatacaccagtgcctttctttcacgcgcctgtggtcgaaggaggactgggagttccactccatgaacatgtggtcccgctgatgagggccaaacgcctgtctcgcctcgatgaaacccctgatccagtgatcgccgcgatgctgaaagtcgtgtccgcccgcgccgggtctgcaaccatgactcgccagaccactcttaatggacgcgtcatgacgtcatcatgtgatctcaagactactctcgcaactatgctgcaccatacagtagatgggagagggctggtgcattccagtcgagtacccgaatgtcaccagtgggtgaaccccgttatgtcttcagggaaccagaacaccgccgggccatatattgccgccatacgcgtcagagggaacctcatcggcacagcattgcgcacgtcacggggcaggccgcaagccctttctgcctgtgattgttgcggtcgaaccggatccctcgcacatatcctgcaagtgtgtccaagaactcacgcatcacggatcgccagacacgacaagattgtggacttggttgagtctgccctcacacgaaagggctacactacctgccgggagcctgctatccctaccccagccgagatacggaagccagacctggtggtggcccgagggagtgccgtcacagtgttggatgccaccgtcgtcgcggacaacgccgacctggcacagagccacagtcggaaatgcgagtactacgatgctcccgccgttcgcgaatggattcgggacaggtacggcagcggcgaagttactttttctgctgtggcactgaattggagaggaagcatggccataccctccgcgtgcgggagccttggggtgagtggagccttccttggtcttatctcctttgtaactctggagcgccgatcttggatcgcaaaccatttccgaagaagcgcttacagagtgaggcacaacgacggcgttgatatctaa

SEQ ID NO: 1666 - DNA, 3663 bp, synthetic construct
  source 1..3663: mol_type = other DNA; note = FH-MCP-MG140-74
atggactacaaagacgatgacgacaagtacccctatgatgtacctgattatgctgccagcaatttcacacagttcgtccttgtagacaacggcggcaccggggatgttacagtggccccgagcaatttcgcaaacggcgtagccgagtggatctcctctaatagcagaagccaggcttataaggttacatgctctgtaaggcagtcttccgcacaaaatagaaagtacacaatcaaggtcgaagtgcccaaggttgctacacagaccgttggtggagaggagttgccagtggctgggtggcgctcctacctgaatatggagttaacaatccccattttcgctaccaattcagactgtgaactcattgtcaaagctatgcaaggtcttcttaaggatggtaacccaattccaagtgcaattgctgctaattcaggcatttattctggcggcagcagcggcggctcaagcggaagtgaaacacctggaacttccgaaagcgctacgcctgaatcttctggtggatcttctggcggatcttccgcatgcgtcgacttcgcctgtggtcagtgtgaaaggacctttggcaacaagggggctcttgggaatcactgtaagtggaaacatgcacagaccagactgccagagcgcaccaatggaggcgagtttccttgccctgactgcgacaacgcctacggatccagtggcggccttaacgtgcaccggagggcacgacaccccgacgtctatcacgctgcccggcagcctgctgcgcgcgtgaaagcccgatggtcttatgaagagttggtcctggtagccagagctgagttggaaattaggggtacgaatcccccgcaaggagttgtcagagttctgcacagcaggtttccggacaggactttcgaagccatcaaatgtctgaggaataaaaatcctcgatacaaggaagtgctcgctgccctcgaggtggaagaagtagacgaggggttgcccacagtgacccccagcgagcagacccacgcttttgcgcaggcagatgggctttggcgcgaccagctccgcatggccattaatatagaacacctgggagtcgatgatctggattgggtggccgacgggtgtccagccgaagatataaggaagaaactcgacgagctgtttgccagctgggttgggcacctcgtgcgcggagaaagagctcccgcccgatcccatcaacctgccgccggcgttactaacccttctcgcgaactggaccctcgccggcggcgcagggcgcagtattctgcaatccaacacctctacgggcgaaagcctagtgctgcggcccacaaggttttggatggctcttgggagtgcggcgaccccgtgcctaccccaacattggaggattttcgcatggcttggcaacctatcttcgaaactccttctatcaaagacaaccgaaggccaacatgcgtgggtcaggtacgctgggaaatagtatctcctgtgacaccaggcgagctcgaaaaggtgctcactgagggggcttctagcgctcccggacccgacggggtgaagcttaaagacgtgatagggctcggaataggagagttgtgtagccactttaacctctggctgctgtgtggatcacagccctcagcaatgtgtgtgggccgaacaatctatatccccaaaggtagtgagtccaatgacgccttgaaataccgaccaattacgatcgcatctcatattctgcgcgtcttccataagattatggcgcggcggttcgatgcttttctgcctctgaaatacacccagaagggattcagatctggcgacggaatcgcgcagcatgtactgagccttcaggctataatcgacggagctaaacggcaaagaaaacctgtcaatctggtgtttctggatgtgcgaaaagcctttgactccgtttcacacgacactattgtcctggcaatgcgaagactgggctgccccgatccctttctgagctatatccgggatctgtatagcaggtcatctacagtgatcgagcataacggagagcggagtgccccaatcttcacgcggagaggtgtcaagcaaggagacccattgagtccattcatgttcaacgccgtcatcgattgggccttctcttccctggacgaccatgttggattcagctttggtcacgtgagagtaaacaacctcgggtacgcagacgacgtggcgctgctgtccgatacccgggctggtcttcggtctcagctcggtaagtttgagtcacaccttgcaaagggcggccttaccatcagtgccgggactgaaggtaaatcttcctcactgtctatcgtggtggatgggaaggctaagagatgggtggtagaccagacaccattcctcgccacaaatgaaggcatcatccccagtctgtccgcttccggcgagtacaggtacctgggaatcatgcttgggtccggcggcgccaaagtgcgaagttccttgagagaagagctcttgcaggggctgcaaaacattacaagggcacccctgaaaccatatcagcgcatgaggattctgcggaattttttgctgccaaagtatcttcacgagctcgtgcttgcccctgtcgcagatggctggttgaattggctggataccgcaattagggctaacgtgagacagtggctgaagcttccgcaagataccccagtggctttcattcatgcgggcaccggcgacggtggattgtccgtcccatcattgagatactccgtgccggttatgagacgcaagcgactcgaagcagtgcattccgccaccgatccgttgagcactgccctcacagcctcacctttcttccaaaaggagctttctgggctctccaggaagacgctgggcggtaggctcgttacagacaagcagtccctggcacaggcatgggcaggttgcctttatactaaggtcgatggccggggcctctcagaagcaaggagctgcgctgaaggatccaggtgggttagcaatccaccccggaaccagagcggagcaaactatatcggtgctattaaagcacgcggcgggttgctgtatagtaaagtgagatcagcccggggcgattctggcagagacgtccggtgcgatagttgtatgcgacccgagactgcccagcacattatccaggtctgcccccgcactagtggcccgagaatgcgccggcatgatcgcgtagtccagtttgttagcgccgctgctgagagagcggggtacaaagtgctggtggagccacggattgttgggcgcaccttgggtgtccgaaagcccgatttggtcctgtggaatgagtcccgagcctacgtggccgatgtgacaataaccagcgaccaggtcgggggcgtcaaagcccatagagacaaggttgcgtactatgatcagcctgaaattcgggagtgggttgagagatttacggggctcagtcatattagcttcagcgccgtggccgctaattggaggggcgtactgtcacccctgagcgcagacttccttaagtcagtgcttaagttgtctaactgggatattagcttgctggggcttcggatatgcgaggagacttaccacatccataggtacttcggaagaagcacctaccgagtgcgaggaaggggcccatctgatatctaa

SEQ ID NO: 1667 - DNA, 3495 bp, synthetic construct
  source 1..3495: mol_type = other DNA; note = FH-MCP-MG140-81
atggactacaaagacgatgacgacaagtacccctatgatgtacctgattatgctgccagcaatttcacacagttcgtccttgtagacaacggcggcaccggggatgttacagtggccccgagcaatttcgcaaacggcgtagccgagtggatctcctctaatagcagaagccaggcttataaggttacatgctctgtaaggcagtcttccgcacaaaatagaaagtacacaatcaaggtcgaagtgcccaaggttgctacacagaccgttggtggagaggagttgccagtggctgggtggcgctcctacctgaatatggagttaacaatccccattttcgctaccaattcagactgtgaactcattgtcaaagctatgcaaggtcttcttaaggatggtaacccaattccaagtgcaattgctgctaattcaggcatttattctggcggcagcagcggcggctcaagcggaagtgaaacacctggaacttccgaaagcgctacgcctgaatcttctggtggatcttctggcggatcttccgcatgcgtcgacgccgccaatcctgtgaatgaccagggaaagccctcccagcatttcccgtgtgatggagaatgtattatctgcacaccacggcatgatgcgggagacccaagcgcagccagagacaaatttcgccacgctttcatcggcaagaggaggctggtcaagcaccttaaagacgttcatggtgttcgggagcaagacattacctggagatgtcagcgatgccatgaactgcacactacttacatagaggccagtgtgcacttcgcccaatgtcgccctcgcagcatcaacggcgacgtggagggtatcggcgccgttacggactgccgaaggtcaagcgatcccgaggctgacgccctcgagcggagaggaaccgtagagggcgacctgatacagcgctctggccgcaaccccgagggagatgtcgagcgcactccttcacaaactcgaaacgaacagacagagattctcgaagagccaattcctccgccaatccacgagagacccgtggagcaccaggcagagacaaatattcacatttgccctgagtgtcagagagtgtttgacactaaggccgggctgcagctgcataggcgcaatgcccaccgggaagcctacaacaggaccctgccagaaccaagtcgccgagcacagttccccgaggaagtgcttcgcgatatagcgggagcgtgcctggaccaccccggacgagctgcatgtggaaaaggcatctcccagtacgccgtgtctcgattccccgcctactccgctgaacagattaatgcgctcagaaagaggtccaaatatagggaggtggagctgaaggtgaggcaggaacgggaggcggccgtcaggaatgcagcagctgtcgatatacccacaccagatgaaacaccgcacgtcgccggaagacgcgaacggagtcctgagggtggacttccacctcccgaggttccaccacgagacgaacggagaactgagagagtggagcgaccagaaaatttgcgcaccgaagctgaacgcagagcctgggactactatgacgctgtgtgcgaaggcggcgacatgaatgctctgtacgaagaactgatggaggaacttgtgaccccatatcgggaacgagggcgggcccccagacctcatcggggcaaccagggcgcaagggcacaaggccccggccctagcaacacagccacagaaccagccacccctctcattgccaataggaatcaaagaaaacgggcccgctacgcattgcaccagaagctgtatcgaaagggtcctagtgcacttatgtccgagctgcgggaccctgggagcacaggggtgaccactctcccagataccgccgaagtggcccgcgtgtatggtgaccgctttggatcagactcaccccaggacacccacgcgttccagccaaaggctggggctgaggtcgtcgagttgaaaccatttagtcggggtgaggtactcgatgtgatcaaaggcataaagctggattccgcagccgggcctgacctcgtgacttccaagatgatttttgagtggggcgtagatgttttgaggcccatagtcaatagtttccttcgactggggcgcattcctgattcccttaggatcaaccgaacaacactgatccccaagaaagcggacccagaatctgtaaacgattatcggcccattaccatagggtcactcgttaacagggcttatgccaagcttcttacaaaacgattgtgcgataaggtgtctcttaactctaggcaaaaggctttcgtgcccgtggatgggtgttcagaacatctgtttgtcgttggggaggcacttgagatttgtcagaaaagaaggaaggaatgcaacctggtttttctggacctggctaaagccttcgatatggtctcacactgtagtatcaccagggctctgaatcggttcggggtaggaagcggcttcgttgagattgtggctgacttgtacgcaggcgtatctaccgtgattagaggcaagcaggggccgactgatcagatcaacatggcccgcggggtaaaacagggctgcccccttagcccgatgctcttcaacatggtgatggacgagctcgtggaccagctgggcccgagacacggtctgaaacctcggcccgagctcgaagccttcaactgccttgcctttgccgatgatcttgttatcgcctccggaaccgtccatggcatgacccagctcttggttaccgtgcgcgaattttttgatgacaggagcatgtctgtgaacgctgcgaaatctcacacgatccggttggcaccagcgcctggcaccagaactgtcaaggttgtggagggtagcacctttagctacggtgggacgcctattatgaatagatcaatcaacgaaacagtgaaatatcttggcctcgctctgagccctaagggccccacgaactttaagagggataaagccgtcaccgacttgaagctgatccgcgaagcagctttgaagccggagcaaaagctggatctgatccggagaatcttgctcccagctcaaatgcatactctgcgcctgtctaggcgggttctgctgagggagctcgaccagctggatcgcattgtccggagaacggtgagagggatcctgcatctgcctcccggaacacctaaggcatttttctatatgaaatccgtagacggagggttggcactccccgaggtgacaagtaccgtcggatacactagactcaagaggttcgtgagactcaaggcaaacggtgatcccctcgtcgctaagtatgcagccgccagcaataaacttgagcgggagcttcgatactgggtgggggctctgggaatcgaggatacgtctctgtccaggctgaatactgctatcttttactatgcccttgtctgcgctaatgccaaatacaaacagatcttccatcaaaaagatatctaa

SEQ ID NO: 1668 - DNA, 3921 bp, synthetic construct
  source 1..3921: mol_type = other DNA; note = FH-MCP-MG140-82
atggactacaaagacgatgacgacaagtacccctatgatgtacctgattatgctgccagcaatttcacacagttcgtccttgtagacaacggcggcaccggggatgttacagtggccccgagcaatttcgcaaacggcgtagccgagtggatctcctctaatagcagaagccaggcttataaggttacatgctctgtaaggcagtcttccgcacaaaatagaaagtacacaatcaaggtcgaagtgcccaaggttgctacacagaccgttggtggagaggagttgccagtggctgggtggcgctcctacctgaatatggagttaacaatccccattttcgctaccaattcagactgtgaactcattgtcaaagctatgcaaggtcttcttaaggatggtaacccaattccaagtgcaattgctgctaattcaggcatttattctggcggcagcagcggcggctcaagcggaagtgaaacacctggaacttccgaaagcgctacgcctgaatcttctggtggatcttctggcggatcttccgcatgcgtcgacgagaaatccagctgccgcatctgtcaggaagacctgcccgaaaataatctccagattagagaacacatcaatgatgttcacaacatagccgaaatcatttataggtgcaagctttgtaccaaaaattacaacacaataagcagtattaaatcacactaccctgcatgtaagcgcaagatagggactaatattccacccaacaacacaatcagaaacatcgcttcacaggttgcgccacccccaacaccggcaccaaccacaaccaacacgaacaataacatcgccttccagtgtaaagaatgccagaaaggcaatgtcacctttgtcgcaaaggacaacaagggcctggtgacacacatgaggacaaagcatgtacaagcttacgaggagagcaagaaggtggcaaatattagaattgcctggagcaacgatgaggaccggatattggcatctcttgagctgcagttgaaagccgtgcacaaagggcagattttggaaaggctgactactgagtggcagaaactcgtccaggagtctagggccaatgtacggtccaaggaagctattagaggcagaagacagcagacagagtataaaaggacgctggaagaactgtctaacacaccgaacggacagccaacccccaccactcggtccccacagggccaaactactaccactgacaacgcctctagtgtgaatgtggatagtgagtcaatcggtgaaatcaaggaagctctgaaaacctatctgactgcagggcacaccaatctcaccgatcacatgaaggacgcaataaatgggttcatcgacaacaccaacagcgttgatccagtccaactcaccatgagcgggatcatggagtctattacaaccatgcgaaaccgggtaggcgcccgcaatcagagaatccctaacattcctaaaaaaaccacaaagaatcagacccggaaacggaaagctgagatgcgagcatactatcagaagctgtatgcgcacaataagtcaaggttgatggacgagattatcgagggggtagctccaaacactgagccgccccctatccatgaaactgttaagttctatgaaaatatttggtctgtgagagccgaggataatcacgcagtcagtaagaaaacgggcatcgctggagacaaccgaaccttgctctctccaatcacaaagccagagatcctgacagccatatccaagactaagcgggattctgccaagggtatcgacactattaccctgcacgaggcaaaacagttggccaacgacgacctgtttgtggcctttaatatctggctgggttgcaagagcatacctgcagccttgaaacttaatcgaacaaccctcatccccaaaggcaaccagaacctggacaaggtgacgaactggcgacctattactattagcagcatactcctgagattgttcaacaaaatcatggctggccgcatgtccaaattcttccagatggacaagaggcagctgggcttcacccctatcaacggttgtagtatgaacatcgcttggttgaacctgctcctgaaacatgcacggctgaacaagaaggagatcaacgtatgcctgatcgacgtggcgaaagcttttgattccgttccacatgattctatttttcgcgccctgcggcgacacaatgccccgcctcacctcatcgagctcattcagcagcagtacgaggacagcagcacaacaattacctaccagaatctgtccagcaagaaaatcaagatcctgcgcggagtcaaacaaggagacgccttgagtcccctgctctttaatcttgtgactgatgagttgttccagatcctgggtgatcgctttggctatacaattgataatattggctccaccaatatcaggtgctttgcagacgatatgtgtctggtctcaggtaccaaggtgggaatgggcaacatgatccgggaatctacccagttccttaatgaacgcggcctgcagatcaatcctaacaaatgcatgacaattgccttggagaagggatacaaggggaagaaaagcaaaatcgtgatagaaccggtgttcacaatccaaggcgctcccgtccctattctgggacatacaacaaataccacaaagtatctgggcgtaaagtttacgtcagtgggcagcataaaggctacagtcataaaggaacaacttatatccgttcttgagaagctccaaaaggtgtcactgaaacctttccagaaaattgaccttctgaggtctcatgtgatacccctgtttgtgtatcagctgatcaacttggaattgtatcccaagctggtgaagcagattgacctcattatcaggagaacgatccgctccatattgcatcttccaaccagtctgagcaatgagtttttttacctctcagtcagagaaggtggactgggcttccccgttcttaaaaactctattgggctcgccaaagttagaatatacaagtctattatgcggagtgaggatgaatttctgaaacaccttatcgagacccatggatttcccatcatcaggcgctttctggatgatttgcaggtgtcaagtagtttcgaaaacgacgatcttgcccaacgaaagcgggaactcaagattgagcgaaacaattctttcgcccaaaaagtgcacgggtacgggagcgagatattcgcgaaatgccccctgactaattcttggctccatgccggatacaagacacttactgggcgcaattatatcaatggaattaagctgaggacgaatactttcgagactaaggtgaccactaaccggggactcgctgtcgataagacttgccggagatgccacaaagagaatgagtccttgatgcacgtcatacagttttgtaataacaccaagggattgagatacaggcgacataaccaaatttgtagccgaatttgtcagaagttgcgggagcgcggatttgacgtgttctcagaaaaggcgtttaccactgacgtgactggtcttccaaatttgcttagacctgatattattgcgaaaaaggacgggaaggccatcatcatcgatgttcaatgcgtatacgagtccacaaccgggagcttcacgaacgccgctaactccaaaattcagaagtacacccctctcatcgaagctgttaaaaaccaacttaactgtacggaggtggaagtcaccgctatgatcgtgggctcacgaggttccttccatcgcgggcacctccatcagtggtaccaaatgggcttctctacaactgagctcaaatatcttgccctgaattgtatggaaaatagtatcaggattctgctttccttcaataggggctgccaggggtccacggacaaccccgatatctaa

SEQ ID NO: 1669 - DNA, 4296 bp, synthetic construct
  source 1..4296: mol_type = other DNA; note = FH-MCP-MG140-88
atggactacaaagacgatgacgacaagtacccctatgatgtacctgattatgctgccagcaatttcacacagttcgtccttgtagacaacggcggcaccggggatgttacagtggccccgagcaatttcgcaaacggcgtagccgagtggatctcctctaatagcagaagccaggcttataaggttacatgctctgtaaggcagtcttccgcacaaaatagaaagtacacaatcaaggtcgaagtgcccaaggttgctacacagaccgttggtggagaggagttgccagtggctgggtggcgctcctacctgaatatggagttaacaatccccattttcgctaccaattcagactgtgaactcattgtcaaagctatgcaaggtcttcttaaggatggtaacccaattccaagtgcaattgctgctaattcaggcatttattctggcggcagcagcggcggctcaagcggaagtgaaacacctggaacttccgaaagcgctacgcctgaatcttctggtggatcttctggcggatcttccgcatgcgtcgacggggaccgggtgaagactgcacaggatgctgggagcaagacaagctcatgccagcgagatgcaccccctgccaatgcccagttcgtttgtgttagttgcaacagcaggtttgaccgcaagtcatctctgagtttgcattccaaaagctgcggtaacacccgaaccaagtgtaactattgcaccgtctcacttacaacatataaattgatcaggcagcatgaacgacggcaccataatgcagaatacatgagagacctggaagctgagaaacccacaccagactccgcatacttcgccaaactcgcagccatggaagcggcagcaaagggcggggttgtgtccattgctgcgatggttactgctaccggcttgaccacccaccagatcagaactaaaaggtcaaaacccgtgtatcagaaatacctcgagatggccaaacgcgatcaggtggccaagagtaagcttcttttcggggccacatccagcgcaacgagcccatctacaagcacttccgtcaccaacgccacgactactgcctccccaccaagccgggccgtgaccgtgtctcggcaacacagcgccgacggcacagccccacggaaaaacgcatcttcatcatatacgcggggtccatgtccaaaggcttcaactagcgcatctccccctggcccacccccaccttccgtcgctcggattgaaacccagacagacgacggcaagaggaggcgactcagctcaccgaccgtgcctgctggcgttcccaccagtgagcgaaagaagaagagactgcaaggatccccactgcggcctaccacgagtaggttgcttcccaatacaacaagcgcctctgccactgggctcccagctgacactccacaggaaaacgcatccccaggccctgacccgcctcccgccgctcccaataaacccgctgacagaccgccagctcctctgggggacgaatccgcgctccagcaacccgaggctccaattaccagttgtaagagactccgatccccttccctgtctccagcgatgcccctcgcccctgcccttaggaggacgtctgcgacagtgacgcctttgcgaacccgcttgccccatgctcctccaccccgactgaatagagactctgccatggccagcgagtttaggctggccctggaggcagtcctggaggcggaagagccatgtcctgggatccacagacttgttacaagcgccctgagcgataataattcaatgtttcaggctcgcctggacgagttttgggccgccacatggcccactaccacgagtcgagagcgaagacgcccacctcgcccgtcaggatacggcagcgtccaccatggaaagggaacaagggctgcagagtacaagaaggcccaggagttgtttggtaaggataaaagaggactcgctaatacgattcttgagggaaggcctattctcacaccgcccgaagtcccaagtattcagcaggttgaggatgtctttgccgccatttgggaggccgatgtggccgacggtcccatcgcggccacatctccccacattcccgtcccctccatgcctcctatcttcgaagcagacgtccagctggcccgggagcactggatgaagtccgctcccggacctgatggtataacagtcgcgcaggtgtgccggatgaacccaagagtgttggctacagtatttaacattctcctcttgagagccgctgttcccagtagctggcgcgtgttgcgcacggtattgatacataagggcggcagccgcactgaccctaacaattggaggccactgacaatcgcgagtaccttgcagagattgttccatcgagtcctgctccgccatctgacctcacacaccactctgcatccttcccaacgggggttccggtcagtggacggcacctttgctaacgctgtaatcctggatgcctatattaagtctaggaccggtcaggggaaagcctggaacatcgtggggatagacctcagtaaggctttcgattcagtgagccataatgctatttctaaggctctcgccctggcaggggttgacgaacgcctcgcaacttacataattactagtcttacaggttgcgctacccagctggacttgggtggaaagaaaagcaggcctataaacatccagagaggcgtgaaacaaggggacccactgagtcccttgctcttcaatttggtcctcgatcccatcctgcagcacatatcaacttgctttaagggcggaacgatcccaggtggggacaaggttcctgtcatcgccttcgccgatgaccttttcctgcttgccgacgacgaccttgagattcccctgatgcttcacatgctggaggagtatctgacacaacagggcctgagaatcaatgctcgcaaatgtgtgtcaatttctgctgctactatcgccggaaagtctgtagtgaggtccaaatctcactacaggatttctgagtccttgatcccttgtgtgggcaacatgaatagtttcaaatacatggggcaccagttctccgaaaaaggcatgatgccatacaatcttggcaacctgaggacttggctggaacgggttttgaaagcccctctgaagcctcaccaaaagatgtgtttgcttaaggatcacgttatccctaaggtcctgcacggcctgtccagccccgccaccactggagataagctccgcgaggcagataggctcatcaggcgatttgtgaagcgcgcactccacctgcaaatccacactgcaaatcatctgatacatgcacgaatcagggatggcggcctgggtgtgctggagctccggaagactattccggaggtaagcctgcgacgctgccgcggaatcgctaacgcgacctctgaccccgtgctcgcaagctttacatcttccgatcacttccttaaactcgtgaataagctggaaaaactggcgggcacagtaccatctaccgaagcgaatcggtccctgatcattacctctccctcttcaagcggattggaggccgccgcagatgacccggcaagccggcagtggcttcaaagcttgccgcagggttggaccgggcgagatttcgtccgggccgtgcacctgaggactggcaatctgccaacaagggatcatcacagcaacccgccggagttgagaaaatgccgggatggatgcgaagaaaacgaaagtctgcgccatatcctgcaactttgtcccagagtccaagcacatcgcattagacgccacaacgaaatagcctccaaagtggccaacgcaatgagacggaagtggacagtagagtgggagccacacgtgaaacacgaggaccgcaaattgtataagcctgatatggctatccatttgccggaccagttggtgatcgtggatgtgcaggtcgcttgggagtggaaggagaactcccttgcggttgcctgggatgcaaaacgaaataaatacaccacccctcattttatggaagccgctgcaagacgatggcctggcagaagagtaaccaccttgcccgtgatcctgggggcgagaggaatatggcccagttgcaacaggaccaccgtgaatactttgaacctgtcaagtgccctgcggagatcctgcgtggaaagctgtctgaagtgggggtctaccattcacaaacagttcatggcctcagtgttttcccagagtactcggtcccggccccagggactctcttctcgagatgctggagatatctaa

SEQ ID NO: 1670 - DNA, 4080 bp, synthetic construct
  source 1..4080: mol_type = other DNA; note = FH-MCP-MG140-89
atggactacaaagacgatgacgacaagtacccctatgatgtacctgattatgctgccagcaatttcacacagttcgtccttgtagacaacggcggcaccggggatgttacagtggccccgagcaatttcgcaaacggcgtagccgagtggatctcctctaatagcagaagccaggcttataaggttacatgctctgtaaggcagtcttccgcacaaaatagaaagtacacaatcaaggtcgaagtgcccaaggttgctacacagaccgttggtggagaggagttgccagtggctgggtggcgctcctacctgaatatggagttaacaatccccattttcgctaccaattcagactgtgaactcattgtcaaagctatgcaaggtcttcttaaggatggtaacccaattccaagtgcaattgctgctaattcaggcatttattctggcggcagcagcggcggctcaagcggaagtgaaacacctggaacttccgaaagcgctacgcctgaatcttctggtggatcttctggcggatcttccgcatgcgtcgacaattcaactccaaagtctttggcatctgatgagcgcctgtgcgcaattgatctggtcccagcaagtgaagggtctattggctgtaatggtgcacggccgtcccggtcaactgataatgagcccgggctgtcacaggattacattcttgaaatcccattcactcagcgagcttgcgcctactgtattacaagcggcgaaggaacattcatggccttgtctctggcggacgaggatcggcacgctcgagagaaacacgccgaaagaactagggtctataagtgcacccagtgcaacaagacctataagacccggcgcgggggcgagaaccacgttgctaagtgcacgggtccccctagtccacgggcaaacgctctgttgtgtaatgagtgtggcgccagctttaacaaccagcttggactttcccaacatcaaagacatgcccatcccgccaccaggaatgaactccgcgtcgccgagtttgccccaaaagagcgaaagtcttcaggcggcccggtcttcagtagcgaagacgtggaactgatgctggaactggaagtgaggtttcgcgaacagaggtatattgcgaaactgatgtctgagtttctcccgggacgcaccctggcccaaatcaggaacaaacgcagggaggctgcttacaagcggagacttttcgagagctccgccatcgagattgacgaggccgacgtcactgatgaagcgagctccgagtgcctgccatcctcaacgtcacatgacgatcaagatttccccgaagtattcggtaatagccctaataacaatgcggacccttccccaccggagcagccttggcgggaaggcatcatcaattctgctcttagctacatgcctgtcaaacagacacccgctggtagtgagacaattattacccttctcaaagaggccctcgctcactgcaaggctaaccagggaattatcacccaggagtatactgatcgggtttataatgaggttctggcccactttatgcctaaggccggcaaagagaccggcagcgagacaaagcgaaaaagaacaaaaggcaacggtggtcgccttgctcgaagaaaatacatctatgctagaacccaggagctttacaagaagaatccttctctggtggctaaaatggtgcgcgaggggaagacccatctggatgaacagaagtgtagcgtggagatgacagaagtgaaggaactttatgattctctgtggggcaccgagcctaaaacgaacaaggccctgtggtgtgatggaggcgaagacaaccacgtgtctcaccgcgtgcccctcgaagaggcgatcccttacatcaccacaagtgaagttgcaaaacagatcgccagaacacggactggggtggctcccgggccagacggactcaaaaagggacagctcaaccatggcagtcatccatacattctccaccttctgtttaatctgatcgcaacaagtgggcagcagcctaccgagtggaggaaaaatcgaactaccctgatccccaaggacgggaaagatgggagcaaggccgagaactatcgcccactcaccatatctagcctgttgtccaggctctactggggaattatcgactccaagctgagagtggtcacaaagttcagcacacggcagaaggggttcgtctccgaggcaggatgttttaataatgtccacatctttaacgaactccttcgacactcaaaagcaaatcagggcatggttgccacaatactcgacgtctcaaaggcattcgacactgtgccgcactccgcgatcggacccgccctgaagaagctgggcttggacgaatgggtggtgaggcttgttgaggatgggtacgccaatgtgcagactgaaatcagccataacgacgggcctattaacatcaacctcaaacgaggcgtgaaacaaggggaccccctgagcccattcctctttaacgctgtgcttgattccctcttgcataaactcgagaactgcccgggttacaagatcactgagactgagcaaattagcgtccttgcattcgcagatgatctgatccttgtgtccactgacgtgaggcaagcaaaaatactgctggcaaagacggaggcctatctgaatagtttggacatgaagcttgcagccgcaaagtgctccgctttcaggatccagaagcacaaggatacctggtcactcaccaaccctgagctcagactgaagggcggagacataccctttgccaatgccgacctgaacattacttatctcggagccaaaatttccccgtggaaaggaattaacattgaaggccttgagtcaagctttatatcatgtctccataggacgatgaagctcaaattgaaacccgcacagaaagtggctttgattaccacgtaccacatccctcattatttgtacccattgacactggccatcccctctcaaaatgtactgcggcgcctggatcaggcgctgagaaacacaataaaacaaatttaccacttgccacagagcactgctaacggcctgttgtattgtgggaagaaagacgggggcctggggattccccgcctggaagtagttgcaagggccgcaacgctcaagactggcctgaggtttggtgcctctgctgaccccgtcatgagggccctgttcgataacggcctcagtagtcaattgaagaccgtagctcaggcctcccgacttccctggccagtgacaattaaagaggtagacacatttaagttgcgggccagaaaaagagagcttgctgaatggagtacgctgaagagccagggcaaaagcgtgagatcattgactgacgatcctatcgggaatgcctggttgacagacacgtctttgctgaagccatgccggatggtgaccgctcttaagatgcgatcaaacgtgacagcagcccgcgtcagccttaatcgcgcgatccctcagtccgatctcaattgcaggaaatgcgggacaaagctggagactctgggtcacatcttgggtgagtgtactcatacaaaacctcagagaatcagaagacacgatgaaattgtagatttcatcaccaacgagataaccaagcgggacaaaaaggcagctgttaccaaggaacctagtattgcactgcctaccgggggaaacctgaagcccgatctggtgaccgagaatagaggacgggtctacgtggttgacgtgtctgttaggcatgaagataaagactacctggccagaggccgcaaggacaaaatcaataagtaccagaagctgctccccgaccttcaaagccgattcggagccaccgccggagaggtgcttccaatcctggtaggtactcggggagccatgccaaaggaaaccttggacgcgctcaagaaacttggaataaccgaccgaaaatccctgttgacaatatctttgatcgctcaccggtgttccatagaaatctatcaccagttcatggactatgatgctcacagtaagcgaaacggcgcggaagaaggtcgaaggcccgatatctaa

SEQ ID NO: 1671 - DNA, 4374 bp, synthetic construct
  source 1..4374: mol_type = other DNA; note = FH-MCP-MG140-96
atggactacaaagacgatgacgacaagtacccctatgatgtacctgattatgctgccagcaatttcacacagttcgtccttgtagacaacggcggcaccggggatgttacagtggccccgagcaatttcgcaaacggcgtagccgagtggatctcctctaatagcagaagccaggcttataaggttacatgctctgtaaggcagtcttccgcacaaaatagaaagtacacaatcaaggtcgaagtgcccaaggttgctacacagaccgttggtggagaggagttgccagtggctgggtggcgctcctacctgaatatggagttaacaatccccattttcgctaccaattcagactgtgaactcattgtcaaagctatgcaaggtcttcttaaggatggtaacccaattccaagtgcaattgctgctaattcaggcatttattctggcggcagcagcggcggctcaagcggaagtgaaacacctggaacttccgaaagcgctacgcctgaatcttctggtggatcttctggcggatcttccgcatgcgtcgacgataatttcgacccggccatccctaccgataatgatatgaacttcgacggaatttcacctgctcaccgaagacgacttcgcccacacagggcgtttgatggcaactccccagtgcacagacggcgacttagacctaatagagggcccttgcctgatgacttgagtgaggatgttgacaatgcatacagggatgctaccgacgctctcctgtctcgagcaaccatggagatcatcttgccactgcccttcactagcaggtcttgcgagagctgcctgcaccaggggaagggggatttcattctcctgaatctcaacgctgccctccagcacgccaggtctcatcactgtggcgtacgagttctgtactcttgtaatacctgtggcaaaacctacaaaggcaaacatgccgctcattgccacgtccctaaatgtcgcggaccccctgctgggcaggacaagacggtgatttgtgggatctgtaacgaagcatttaaaactcagcggggactgtctcagcatgagagactgaaacaccctgtcgaaagaaacgagaaaagagagcgggcaatgacagatcgacctagccagcggcctaacagaggctatggcaaggtgtggcagaaggaagagttggacactatgattcgacttgagaagttgctgcgaggtcaccccaacatagccatgcagatgaaggagcatttcccaaacaaaacactgaaacagattcgggacaaaagaagagagcccacctacagggcccttgcggagctgtacgacgcaagtcagggccactccgcgaccccggagctcctcgaagtcatatgcccaagcagcgatagcgaaacagagtcacgccctgttcatacgggtctgcatatatccgaaactgaggatgaagacacaagcgaccagggtcagttctcacgacggcttagtccttcatcctcacgatccggacaggcttctcttgcccatcgccacctgacagaatttgagcgactccctggactggagcgacccgctgatgatggcctgcccccacgccgagaagacgccgacgatcgagagcagcaggttaatatcacgccatctaaagagtccggcgcgacggacgatcttggtagcgccacaatgactgagcaagaatggagaactggcatcatacgccagaccctggcggaagcccccgacgggtcaaccctctcctccaagtgccgggacctgcactcaaggctggtgtccatccttaccgacatttcagatggccagctgttggctacacaggctctggtggatgatgtctatgccagggtactcgcccagatagagtcctcccagacaactcatgcttccaagcgctctcgcaccagaggaccaaagacacagtcaggcagaaagcggaagtggaagagatatagatacgcacgcactcaggacctgttccggaagaatccaaatctgttggcaaggtatattcgagagggtacaccatggttggaagacgaggatagcagctctcttaaacaggaagatataaagagtttctatacttctttgtgggggacaaccaggaatatctccgtcccgttcagcgtcacgggatctggtcgaatcgcacgcaatatcggggaggtctttcaggccattactgccagggatattaaggagcgccttacacacacacggcacaacaccgcctcaggccccgacgggatccagaggaaacacatcacagggcaggatataaaggaattgttgcggatcttgtataatcttattctggtgtctaagattcagcccaccgcttggaacgcaaaccgaactattctgataccaaaacagggcaaagacgggtcccgcgtggaaaattatcgcccgctgaccatcggcagcctgatttgtagaacctactgggggattgtagaccggatgcttagagagctgattcactttagcccacggcaaaaggggtttgtgcatgaaaccggatgcttcaacaatatccatatcctcaacgagaccatcaaagcaggcaagaataggaatggactggttgctgtgcagttggacattgctaaggcattcgatacccttcctcacaaggctatcgaggctgccctggaaagactgggtctgccctccgtggctcgcgaatccattatgaacagttatactaatctctctactaacatcgaatacgccggcctgaaaacggaggtcccgttgcgccggggtgtgaagcaaggggaccccttgtctccatttgtgtttaatgccataatggatccgctcctggatcagttggagcaaatgaaggggttcgtgatcaacgaatctcacagcctcagtgccctggccttcgcagacgacctcatccttctctctgatactaaagacaaggcccagaggctgctgaaccatacggaaagctatcttaacgcattgggaatgagaatcgccgcagagaaatgcgccagcttcgagatcaggcccacaaaagagtcatggtacatcattaatcctgatctgagcttgaccaacggcgataaaatccccaatagcgctgcggactcctcactgtcctacctcggcgggcatatatccccatggtctggtctccactataaggatctggtggaccaactcgcgaccaccctcgagcggtgtcgatcagctagactgaaaccccatcagaaactttctctgaccaccagccaccttatccctcactttctgcataaaactgtgatggccacacccccgatttctacaatccgcgctatggatcaaacaattaggaatcacgtcaaagtagtgcttcacttgccaatgggcacccccaacggattgctctattgcagtaagcgcgatggcggactcggcattcctaaactggaagcactggccacaagcagcgcgctcaaacaggggactactttgttgaacagtttggaccccgccatccatgcccttctccaagagacgaagctcgaacaaaggatgcagagcctggccaaggctatgcgactgcaatggcctatcctgaactttcgggttatagatgcatataagaagagaatgaagactgaggagcttaaagcctggagtcaacttaaggttaaaggtagaggtgtccaatcttttaccgaagaccggtatggcaatgcctggctctacaatccaaacctcctcaagccaagtcgatttcttacggctctgagaatgcggggcggaatgaccagtgacaaggtgaccatgaataccgttgttcctcaatcaaatgtcaagtgccggaagtgccggacttgtaacgaaacactggcacatgtgcttggccaatgcatatacacaaaggcccaacgcattcggcgccacgacgaaattcgggactttgtgacaaagaaactggcagcgatgaaggagggagtaaagatcattgaggaagcccttattcccaccccaactggtaacctgaagcctgaccttgtagtcgtaaaccaggggcgagtgcatgtggttgacgtcactgtgcgccacgaagacaccggatacctggatgagggccataggtccaaagtggagaagtacacgcccctcgtcgagattctggctgaacagttgcaggtggagagggggagggtgcttccactggtggtgggaaccaggggaagtctgcccaaaacaacaattgacagtttgagggaaatcaacatcaatgataggggaagcttcatcacaatctccctgctggccctgaggaacagtatagaaatctaccacactttcatggactacaacgccctcgttgcagatatctaa

SEQ ID NO: 1672 - DNA, 4386 bp, synthetic construct
  source 1..4386: mol_type = other DNA; note = FH-MCP-MG140-101
atggactacaaagacgatgacgacaagtacccctatgatgtacctgattatgctgccagcaatttcacacagttcgtccttgtagacaacggcggcaccggggatgttacagtggccccgagcaatttcgcaaacggcgtagccgagtggatctcctctaatagcagaagccaggcttataaggttacatgctctgtaaggcagtcttccgcacaaaatagaaagtacacaatcaaggtcgaagtgcccaaggttgctacacagaccgttggtggagaggagttgccagtggctgggtggcgctcctacctgaatatggagttaacaatccccattttcgctaccaattcagactgtgaactcattgtcaaagctatgcaaggtcttcttaaggatggtaacccaattccaagtgcaattgctgctaattcaggcatttattctggcggcagcagcggcggctcaagcggaagtgaaacacctggaacttccgaaagcgctacgcctgaatcttctggtggatcttctggcggatcttccgcatgcgtcgaccaattgtacacaagtctggcagtcaaatcaactactaatcatacacaccaagtgaacaatgctggatgcacccaggagtccacagggattagaaaaaacagtgccaaaatttccaaccagcaggacctcacacgatcatactgcgtgtattatccgctggggacaaactccatctgccctgaatgtcctaacttgcttggccagagcctcacaaacattgagaaacatctcaatagtcatggaattagccatctcgaatttggctgcgggatatgcaggaggcagtggccgtcatggagatcagtgtccatgcattattcccgcagcaattgcaggctcacttcaactacctccacccctcacatcaccggaacccagggctcccctaatgtctcacactctcaggtgaagtccgtcgagaagttgtcttctcggcgcagcagctctaccacggccgatgatgaagagtccgaagccaaagaacccatagtacggaagaagatggtcgagattgggtccaccgaggaaaatagcacaggcagaaaggagaaatgtaccccttcagtgaatccccggggcgatgcgagcaatcatatcgacaggtcaattgccgacgcctctcagcacgctcacatcggcgacatttctgaagatgacgggaatcctaatgatcgagagagatccaccgccacaggtaacatcgacgttgatcccaagaagacaggcgagaggcactactgcaagctctgtgccagccacgggtgggggaacaaggccggacttagtcaacatatgcgacagaagcacaaaagcgagtacaacgcatctattactgtccccatgatcaagcgccggtggacacttgatgaaatggtcgttttggctgaacttgaagctactctgaccagtagccagggcagctgttctagcaaggacttggccgaacaattcccttcccgaacgcaggagagtatcaaactcaggcggcagctggaacagtaccaagaagttctgcgacaggtccgccttaacagggcaactcagaagggcgaggagagtaattgtcttggtgcgtctagtagcaacgtgcacatggtgaccgtggcaaatgactccatcaacaacgaggaggatgacgacagtgactcacgagacaggagccccgggacacagctgggaacagactctaccgcgtgccctagcatacagcgatatgtccaggagaatataatccggggaaaagtgaagatgtgtacaacaatgcaggacgctctgatgcactacgtggcggatgtttgtgggagcgacccagtatccgagtctctggagggcattcgggaggccttgtccagcgtgcagcctagccagaagcacagagatggtaaaactaatgtaggctctaagccgcggagcgctaaagtcatgcggaaagctgagagattcgcacattaccaacaactgttcaagaaggataaaactaagctggcctctgagatcttcgatggcgtcgataactccgctgccaaaccaccaatgtccgtggcatacgagcattataagaaaatctggaccgtagttacgaaagatacgggtactcttagatctcaggctagtgtcgggaaagatgttctgctcgcaccaattacccgggaggaaatcgcgttggctatcgatcataccaaatccaacaccgcagtgggcccagacagacttcctcttatggatctgaagcgcatcgcaaagaacgagctgtggggcgcgtataacatttggatgggtcttagacgggtaccagatccgttgaaaataaataggaccgtcctgcttcccaaaggaaaggataacctcgacaatataaagaactggagacccattacaatcgcttccgtgctcatcagaatttataataaaatcttggctagacgaatgcagtctgtgttccatacctctagcaaacagactggttttaagcccgtaaacggtgttggacagaatgtcgccctgctgcataacctgatccggcacgcacgcacgaataaacggaatatgttcgtcagtcttctggacgtgtccaaggctttcgatagtgttccccacgaaagcattaaaagagctctgacgcggaatggatgcccctctgagttcatccagatcatcgaaaaccagtatgaaaattcttacacagcactcagttataccgatggcgacagccctttgatcccgcttaatcgcggtgtgaagcagggcgaccccatgtctagcatcctgttcaacctcgtgatagacgagctgtttgaggttatcggcgacaggtttgcttacgagctggaaggtgttgggaaggttaatgcaagggccttcgctgacgatatagcacttgtctctggtacagaggtaggaatgcaacaactgctttcaactaccgaggaatttctgcacgcacgagggttggagttgaacgccgaaaagtgcatatctattggccttcggaaggcaggtaaggccaagaagtcccagattgttgactcaagcgtcgagaacccacctgtgtttactgtcaaagataagccgttgcaactgctggccatcgacacactttgtcggtatctgggggtgcagtttaccccacttggggcagtggaccctcgcgtgcccgtgtcagccttgaaggctgccctcgaatcccttaagaaagccccactgaagcctcaacagaaagtggtcatgctgcgcgcgtatctgattcctagattcatcttcgcctttacacatactgaatgctacccaaagctgatgggccagcaggacaggctcatccggaggtggcttaaggaaattctgagactgccagccagtgtgtgttctgagtttttttaccttcccctcaaagaaggcggcttgggaattggacagttttatgatatagttggaatcgcgaaagtgcggctgcacgggactttccatcgggctaacgatgagtgcctgcgctttcttgtggagacccagggaagcgcaatgcactcccgctggtgcaatgccatgaagctgtcatccaggccatcagctgtagacttgcaaacccgaaacgtcctcaccctcgatcagtctcgcgcacgcctcagcgagacggtgcacggcataggctccaaagtttttcgcgtttctcccatcacaaaccaatggctctctgggcagacacgaatcatgaagggaaatacttacataagggccattatgatgaggacaaatactaccccaactagggtgtcaaccagtaggggcagagactcaattaagacgtgtagacgctgcggcctggccgatgaaaccctcagtcacattctgcagacctgccccctgacccagggaatgcgctgtaagcggcataacaatgtgtgtagaaaagtggcggacaagctccggtccaaaggttatcaggtgtacagcgaacaagggatgccctcacctggactgcagacaaacatttcaaggccagacctgatcgccgtgcgaggagatcgcgccctggtactcgatgtgacgtgcgtgttcgaaagcgaactggggtgtctgcaacgagcctaccatcagaaggtagacaggtacaagccactggccggcaccatcaaacaaaaatatagtgtgcaggacgtggatttccacggtttgtgtatcggaagtaggggcgcctacgaccccgggcacctggctgtgtggcacactattgggttcaccggagtggagctcggaactctcgccgtcggcgtcatcgaggactctttgagaactattgccttgtttaacaacgctaatagacttggcattgatatctaa

SEQ ID NO: 1673 - DNA, 4077 bp, synthetic construct
  source 1..4077: mol_type = other DNA; note = FH-MCP-MG140-102
atggactacaaagacgatgacgacaagtacccctatgatgtacctgattatgctgccagcaatttcacacagttcgtccttgtagacaacggcggcaccggggatgttacagtggccccgagcaatttcgcaaacggcgtagccgagtggatctcctctaatagcagaagccaggcttataaggttacatgctctgtaaggcagtcttccgcacaaaatagaaagtacacaatcaaggtcgaagtgcccaaggttgctacacagaccgttggtggagaggagttgccagtggctgggtggcgctcctacctgaatatggagttaacaatccccattttcgctaccaattcagactgtgaactcattgtcaaagctatgcaaggtcttcttaaggatggtaacccaattccaagtgcaattgctgctaattcaggcatttattctggcggcagcagcggcggctcaagcggaagtgaaacacctggaacttccgaaagcgctacgcctgaatcttctggtggatcttctggcggatcttccgcatgcgtcgactgtgtgtattacccacttgaacttaattctgtttgcagcaggtgtgacgaatcacttgggtgtgaggtggccaacattgaggagcatctgaagagtcatgacatttttaagtacgagattaaatgcggcgtctgcgataagtcctggcctagttggcggtctgttacagcccactataacagatccaagtgtaggaacacaacaccgacaatctcccatgcaacaaccaccgccaccaccacaacaaccgtgaaagagaaagcttccgaccgcgaaatcgatgaggaagagaccggaaagcgaatgactaccaccgagagcctgaaggtgactactcaggaggagaaggaggagaagaaagacgaaggacttttttattgtaaactttgtgctgcaggcggatggaataaacaggtgtccttgagccaacacatgcggcatatgcacgcaaaggaatacaacgcggctatcgaggtacccaatattaagcgaagatggacaaaggacgaggtccagctcctcgcggaactggaagccagcgtgccgtctgatgacggtacatctatcaatcagattctgtcccagcggttcccctcacgcaccttcgaagcaattaagagtcagcgcaaaaagtctgattaccgagacctggtaaaacgcattagagaaaggggcataattgaggagagcacctgtactgacaatagtagcatgaaaataaagtctagcagtaactttaacctgaataataatcccaatccgatcgtcaacgatggaaactgctttgacattgatgaagtagatagtaatgattgccatcagctcaatagcctccccaccgggtcaaacgatgtcgagcagtaccctgatataaggctgtatgtcagaacaaacatcatggatgggagggtacagctctgcgataaaatgcggttggctatgatcgacttcgtgaacatcgattctcaaaatagtgatgccgttaatatgtcccttgaggggatccacgaggctttgaaaatgaagaaaaagaaggccagcaacgaagatagtcacgaggatgaaaagaagaagaaaaactccctcagtggtaagcttaagaataacaagacgaagaagaaaatgcagaaatacgcccattatcagcagctgtttaaaaagaacaaatcaaaactcgccagcgagatctttgactccgtcgataccagcgcttcaaagcctccaatctcagacgcctacgatcattttagaaaggtatgggaaattaaagcctcagacacggccaccgttgacgagatagagcccagagggaccaacatcctcctggcgccgattacgcgggaagaaattgcttgtgttatcgaacaaaccaagaatgacaccgcagtggggccagacgagcttacgctcgagagtttgcgctgtatcgcgcgcagggagctctggtgcgcatacaatatatggataggcctgcgccatatacctgaacagctgaagctgaatcgaactgctctgctgcccaagggtaacgaggggctcgaacagattaagaactggcgccccatcactattgcctccctgctgatccggctgtacaacaaaatcctggccaagaggatgcaaaaagttttccagatctcccacaaacagaccggatttaagccactgaacggcgtcggacagaacaccgccctgcttcacaacatcctgaaacacgcccgagccaataaaaataacttgttcgtctgtcttctggacgtgtccaaggccttcgactctgttcctcatgactccattaaaagggctttgaaacgcaatggttgcccaaaagagatgatcgagctggtgggagaacagtatgagaacataacaaccacgataacatacggaaaagaatgttcaccggcgatcgaattgaagagaggggttaagcagggcgatccaatgtcatccattttgttcaatctggtgatagacgaactttttgaaatcgtgggtgatagattcggatacgaaatatccggggttggctccgtcaacgccagggcttttgcggacgatcttgccctgattagcggaacggaaattggaatgcaggagctcctctcccaaactgaaaaatttctgtcttgtcgcggccttgagctcaacgtaaagaagtgtgtggcaatttgccttagaaaagctggcaaggcgaaaaaatcacagatcgcagactcatccgtgaaaaatcccccatcttttactgtaaacaatgagccaatccgccttcttggcgtcaaagaacagtgcaagtacctcgggattcaatatactcctctcggcgctgtggaccctcgggaaagcgtgagcaagttgcgcttggctctgacaagcctcctgaaggcacccctcaaaccacagcaaaaggtggtcatgctgagaacttatctgataccccgcttcatacacacattcacgtatactgaatgctatcctaagttgctgtctcaacaagaccggctgattagaaggcagctcaagagcatcctgaagttgcccgctagtctttcctccgacttcttttatctgccattcaaagagggtgggctgggtattgggaaactttacgacatagtgggattcgccaaaattcggctttacaatatgttcgcacgatctggggatatgtgtctgaaatatctgaccgagacccagggcagcagtatgcacgctcggtggtgccaggcaatggggctttcacaccgacctcctatgacggaagtcaatcagcggaaaatcgtcgttcgggacgagggcagggataggtttatccaaacagtacacggaagcggccacgaggtcttcaaaagcagcccaatcactaaccagtggctctcaggacagactaagatcatgcgggggtctacctacatcaggtgcatccagatgcggaccaacaccatcgcaacgcgagtgtctaccactcgaggacggaatagtattaagacatgcaggagatgcggattggccgacgagacactgatccatattctgcagacctgccccatcactcaaggtactagatgtcagagacacaataacgtgtgccgaaaggtggccgagaagttgaggtctaagggcttccaagtgttctctgagcagggcattccatcccccggcctggagactaatatttctcgacctgacctgatcgctatccggggtgatcacggcctggtccttgacgtgacctgtgtgtttgagacaggcaaacacagcctcaccgaagcctatcgcagaaaggtgacaaggtacgaatcattggcagagaccatcaaggtgaagtacagaatcactactgttgagttccacggcttgtgcattggttctaggggcgccattgaacctcgacatctttctatttggcatagcatcgggtttagcacaacagagcttggcgtgctggcagtgtctgtgatggaggatagtttgcgaactatcacattgttcaacaacgccaataagttgagactcgatatctaa

SEQ ID NO: 1674 - DNA, 4215 bp, synthetic construct
  source 1..4215: mol_type = other DNA; note = FH-MCP-MG140-104
atggactacaaagacgatgacgacaagtacccctatgatgtacctgattatgctgccagcaatttcacacagttcgtccttgtagacaacggcggcaccggggatgttacagtggccccgagcaatttcgcaaacggcgtagccgagtggatctcctctaatagcagaagccaggcttataaggttacatgctctgtaaggcagtcttccgcacaaaatagaaagtacacaatcaaggtcgaagtgcccaaggttgctacacagaccgttggtggagaggagttgccagtggctgggtggcgctcctacctgaatatggagttaacaatccccattttcgctaccaattcagactgtgaactcattgtcaaagctatgcaaggtcttcttaaggatggtaacccaattccaagtgcaattgctgctaattcaggcatttattctggcggcagcagcggcggctcaagcggaagtgaaacacctggaacttccgaaagcgctacgcctgaatcttctggtggatcttctggcggatcttccgcatgcgtcgacaaatccaagaaaaattcccagagtcaagtgaataacgccgacgatgagcaagagtcaggcaacgcaggcaaagaccgggctggtgttcgatcaaagcagctggattgtagtcagagttattgtctttactacccttttgagatgaacagtacctgtcagatatgcaatgatttccttggtaccacctcttccaacatcgagaaacatcttaagagccatggtatcgataagtacgactacaaatgtggagcctgcaacaaatcctggccatcatggcgcagcgcaatgactcactattctaagtccaactgcaggctccgaggcacttctactacaacgagcaaagatacccacactacgacaacatctgccgcggctacagctaagaccacaacgacgatggtgcacacatcctcacaacaggtgaccgtggaggttctgtcccaggatggggagcccaaggccgacgacgagactagctccaatgtgagttcccaggcgaaggaagagcccaagctgctctactgtcggctctgtgccagcggagggtggactaaatctgtgagcctctctcaacacatgcggaggatgcatccaaccgagtacaacgcttctatcgaggttcctacggtcaagcgccggtggaccgatgatgagacacagatactggcccagttggaagcctcaattcccccatctgatggcctgttcatgaaccagatgcttgcaagcaagttcccctcacgaacttttgaggctatcaaaagccatcggaagaaagaagactaccgcgctctcgtggagcagttcagaactcagatgtctgtagtctccgagaatgagaggtctaactgtatttacaacgacaataacgaggatcaactttcacatgtcaataccaatcctaatccgaacccaaacccgaacaccaataacaacggattcgacggagacgatgaccttcccgtggttcaaaccatcgcgaccgccgccaccacaaccactacaataaacgttgaggaataccctgacattaggagatatttgaagacccatgtgatcgacggcaaggtgcagttgtgtaatacgatgaaggaagctcttatcgagtacgtgaacaatatcccacataccgacccagttaataagtctcactcaggaatttgcgagatgataaaggacgtgccccgaaatcctaaggatcccagcgtgaaaacaaacgacaagggccggaggaaaggggagaagtccaaaaagaaggctcaacaatatgcacactgccagagattgtttcgcacggataagagcaaacttgcatcagagctgtttgataacgtggataccaccgccaagaaacctcctctttctgacgcttatgaacatttccgacagatctgggaaactgatgcgtttgacaaaggggccgttgaacaaggtaacgacataggtacggacattctgctggctccaatcacccgcgaagacatacagctggctatcagtcagacaaaaagtgacactgccgtcggcccggacagaatctccctcgaccagatccgaagcactagtaaaaatgaactgtggtgcgcattcaatatttggttgggcagccggcggattcctagcactctgaaaattaacaggacagccctcttgcctaaaactaatgagggccttgaaaacatcaagaattggcgcccaatcacaatcgcatctctgctgattagactgtataataagatcttggctcgcaggatgcaactcgtttttagaacatcacagaagcaaactggtttcaagcccatgaacggggtcgggcagaatacctcacttctgcacaacttgctgaggcacgcccgaactaataagaacaacctgtacgcgtgcctcctggacgtatctaaggccttcgacagtatcccacacgattccataaagagagcgctcattagaaacggttgtcctcctgattttgtgaatctggtgagcgaccagtacaaccaaacctacactcggatcacctacgggagtgaaaacagcaaagagatcctgctcaagcggggtgtcaagcagggcgatcctatgtcatccattctgttcaacatagtcattgacgagctttttcagatcatcggtgaaaggttcggctatgaaatcgagggggtgggcagcgtgaacgcccgggcattcgccgacgatatagcacttatctccggcactgaaatagggatgaaagaattgcttacgattaccgaaacatttctctccaacagaggacttgagatcaacgttaagaaatgcgtggcaatttgccttaggaaagcaggaaagatgaagaagtctcaggtcgccgacagcacggtcaagaatcccccaatccttacagtcaataacgagcccatccggctgcttgggattaatgaacaatgcaagtacttggggatacactatactccgctcggggccgtagatccgaaaaccgccgtgattaagctgagatcaagtcttgccagcctgagcaaagccccactcaagccgcagcagaaggtgctcatgctccgaatttacctgatccccagatttatccacagcttcacatatacagagtgttacccaaagttgatggggcagcaggacagattggtccggagatggctgaaacagattctcaaattgcccgctagtatctcaaccgactttttttatctgcctatcaaagagggcggcttgggaatagcgaagtttcatgatgtaatcggtaccgccaaactcagacttcatggaatgctgacaaactctggtgacgtatgtcttcgatatttggtagaaacacagtctagtgcaatgcacgcccgatggtgccagacaatgggcctgccttatcgccccagctccattgaagtcaattctcggcagaaaatcctcctggacgagagccgctcacgctacgcacagacagtgcatggcgggggatacgatgttttcagagtgtccccaatcactaaccgctggctgtccggctacaccaagattatgcgcgggtccacctacatcaggtgtattcagatgaggacaaatactataccaaccagagtaacaacgacaaggggacagcagacactgaagacctgccggcggtgcggactggccgacgagactttgattcacattctccagacttgtcccattacccaggggatgcgctgtactcgccacaataatgtgtgcaggatggtggctgataaactttgctctaagggctataacgttcacgcagaacaaggcatcccctcccccggactgcaaaccaacataagcaggccagatctgattgccatcaaaaatgatgaggctctggtgttggatgtgacctgcgtctacgaaacctcaaagtcctccctgcatgatgcttatcgaaggaaaattgaccgctatgcacccctgagtgatacaatcaaacagaaattcaaggtgaatcacgtctctttttatggcctgtgtgtgggaagtaggggcgcctatgatcctaagcacctgagcatttggcatagtctcggattctctggaaatgaactgatggtcatcgctttgcgagtaatggaaaatagcctgagaaccattaaactgttcaataacgctaatcgcttgtgcattgatatctaa

SEQ ID NO: 1675 - DNA, 4047 bp, synthetic construct
  source 1..4047: mol_type = other DNA; note = FH-MCP-MG140-123
atggactacaaagacgatgacgacaagtacccctatgatgtacctgattatgctgccagcaatttcacacagttcgtccttgtagacaacggcggcaccggggatgttacagtggccccgagcaatttcgcaaacggcgtagccgagtggatctcctctaatagcagaagccaggcttataaggttacatgctctgtaaggcagtcttccgcacaaaatagaaagtacacaatcaaggtcgaagtgcccaaggttgctacacagaccgttggtggagaggagttgccagtggctgggtggcgctcctacctgaatatggagttaacaatccccattttcgctaccaattcagactgtgaactcattgtcaaagctatgcaaggtcttcttaaggatggtaacccaattccaagtgcaattgctgctaattcaggcatttattctggcggcagcagcggcggctcaagcggaagtgaaacacctggaacttccgaaagcgctacgcctgaatcttctggtggatcttctggcggatcttccgcatgcgtcgacttgaaacggaatggggaacgaagagacctcgatgaccaggccgactctactccccacaaaatcccccgaaaaggctccgctaaaagaacgctgttcccccggcagcacgaggggaatcacgttttttttctgtcttgggaaaaaggttggaggaaagagatggggtctagcaataaattgccccatagcgtgcaagtgggcctgaggttcccctggaacccaactgcctgccccatctgccactgtttgctttctaccgggacaacagctatagcccatatgcgcagaacacaccgacccagaaagcttcgactctattgcgcccggtgtagccttcaattcgggagacattcccagatcagtacccacgtgcctaagtgcggagagcgagcgaaagccacaagagcaggcagcaccgattttgcttgcgatcattgtcctactgcatttgcaagcaggtccggactggcaaaccataaacgagtgaagcacacagagacatatcttaaggagttgaacagtactgccagggacccgaagaaaggtagagctatttggagtcacgaggatgtagactaccttggtgtcttgctggcaaagagcggcggagccagcgaagcattgcttgaagcccagggacaccttacccaatactctcggaggcagatcgcttctaagtgtaggcagttgttgaagacccaagctgagtcaaagttggcacttacgcagggtaccgtgggagttgagtatgaccgcgcggctatggagcgaccactgtccccgcttcctccaacccgcatggtcaagactctgctggacgcgtctcttgcatcagagggggcagatgggttgattgtgcctaaaactgtggacccaaaggttatcgacgcgtatctcagggaggtcattactcagctcgcggggcatcgcaagctcttcaaaactaagtcaaagaccgcaacacggcggatcagacggcgcgcaaccaagaggaccgaaaaggccgctaattacagaaggctgcagcgaatgtacatgaaagataagcgcgccaccgcaaaatatattcttgacggcgcgtcaaccagcgcttgtccagtgaatcctcgcactgtagagcaggcctttaagcaggtgtggcagagtaaggacctgtttagaggtcttggccagttcggtcttttgccgagttctgacaactctgtgctttgcggtcccattagtccagccgaggtccttcggacagtgaagagcatcaaacgcaactctgcccccggtccagatggcgttcggaaaactcatctcctgaagtgggatcctacgggcaagaaacttgcttccctctttaatgccattttgtactgcggcaagctgcctaaatgtttgaaaggctcacgaacagtccttctgcctaaaactagttccgagaaggatcagctggacataggcaattggcggccaatcaccatcggaccgatcattctgagagccttttctggtgttctgaacaaacgcctcacagaggcctgccccgttcatccatgccagaggggtttcatagatacacctggatgctcagaaaatctcgcccttcttgagggcattatgcggctctcacgcctcgaaaaggcacaactgggcgtggtcttcatcgacgtcgctaaagccttcgattccgtgtcccacaaacacatccaggaggtgctcgagcgaaagggggtggacgaacagttcagactgctcattcaagattcctacaagggctgccataccgtggtgcaaaccaaggtaggagttacgggacgaataaggcttcggcgcggcgtaaaacagggggacccactgagccctctcctgtttaacttggccattgatccactgttgcacgcgctggagaaattcggaattggattcgaatttcaaggggctaaggtcaccagcctggccttcgccgatgacctggtcctgctgtccaacagttgggcaggcatggccaagaacctgaccatcttggaacacttttgcgatgttaccggcctcagggttaatcctaagaagtgtcattccttcatgattaaacggaacggatccaagcagtacagcgttaatggatgcgagcagtggacactcagcggcatccccctgcggctcataggtgagcacgaagcagaaagatacttgggcgtgatgataaatccgagaaaggggatcgtgaagcctccactgagagacaccgtaaagggaatgcttgagaatctctcagtcaaggggctgaaaccgttccagcgcctggaactgctgaagatctacgccctcccacgagtgatttacgtcgccgaccatggcaacgccgggactgctgaactggctgcgtgcgatcgagatataaggaccagggtgaaagcttggctgcacctcgagccttcaactgcagacggcctgctgtatgcccgccccaaggacggcggcctgggagtgcttaaactgagcgtgcatattcctgccgtgcagctcaagagacttctgaagctgtttaactctgaggtacaaaacatccgaacaatcgctagagctgccactcctgaccgcgcactggaacggctgtggaataggtcccaggggatcatcacctccaaacaggatgccggcacattcacccccagccggattgatgagtctaaactggctgccaaagtctggcgggcgacggaacaccagaggtggtcaaggttgccctcacaaggtgtgggagtcaccgtgtttgaaaacgacaatatctccaatgcttggctgcgagacctcagcaggaacggctttaccacagcagagacgatccttgctctcaagctgagaactagcacagtgccaacacgagcaaacgaaatgaaaggcagaagcccccggactaacgaggtggtgtgtaggctgtgcggaacagataaagagacagttgctcacattatggggcggtgtcggaccctgaagcgcaacaggatgagtcgccataataaggtgtgtgacttgctcaaaggtgaaagtgagctgaagggctggtccgtcgtccaggaaaagaagttgacgctcgacaccggcgaagttggcagacccgacctcattatggtaaaaggaaaaacggctttggttttggacgtcgccatcccctgggaggtgacgggggataccttggccgatgccgaaagggggaagtccgataagtataaaaagttcgtgcgcacagtcctcgagctgtatcccggagtcgagagggttcgagtgtcagggtttccagtgggagcccgcgggaaatggcacaaacggaacgacggcatcttgcaggaaattgggcttagtaagactagaataggcagtttctctcgattgttgtgtaggagagctctgctgcagtctgtagatatgtgtaagactttccgaggactggtagcccctaagggggcgcgcggtgccgggcttagaggaaatctggctgatatctaa

SEQ ID NO: 1676 - DNA, 3639 bp, synthetic construct
  source 1..3639: mol_type = other DNA; note = FH-MCP-MG140-124
atggactacaaagacgatgacgacaagtacccctatgatgtacctgattatgctgccagcaatttcacacagttcgtccttgtagacaacggcggcaccggggatgttacagtggccccgagcaatttcgcaaacggcgtagccgagtggatctcctctaatagcagaagccaggcttataaggttacatgctctgtaaggcagtcttccgcacaaaatagaaagtacacaatcaaggtcgaagtgcccaaggttgctacacagaccgttggtggagaggagttgccagtggctgggtggcgctcctacctgaatatggagttaacaatccccattttcgctaccaattcagactgtgaactcattgtcaaagctatgcaaggtcttcttaaggatggtaacccaattccaagtgcaattgctgctaattcaggcatttattctggcggcagcagcggcggctcaagcggaagtgaaacacctggaacttccgaaagcgctacgcctgaatcttctggtggatcttctggcggatcttccgcatgcgtcgacatgagtaatcgaaccctcagcggcaccgaccagatcccatgtaccgatcccgactgccatcaacttttcaacaccgtcagaggtaggaacattcactttactaagaagcacggcaagggtaggagcagcaacagcatcaccaatttcgaaaatgacgaccagtgcactccaaatgccggcccaagtcagcataatcgcatgttgtgcactgtttctaactgcaacaagtcctgttccggaaccgtgggtcttacctctcatttcaggcaagctcaccctgtcctgcatatcaaccagatcgcaaacaagtatgactctcccgcccctaatacaacttcagagtgcgaggagtcaacccccgttgattccccaagaagcacaacacgaaagaacgaaaacgagcagatccaggagatcatggcgaactacgagaacgaccttcaggtgcttctgtcagagtcaattaacacggataagcttgacggaattaccgataagttgtttgtcgagttccgaaatattatcaagttgctgccaggcccacaacacccggcatctaagttttatgaggcccggaagaagaagcagcagttccagtctgaccaccggacctttagcacaactaccaaccctcagaggaagagtaaacgagaacgccagagacgcaaagaacagtataattatgacttgtgccagtttttgtactataaccaaagaaaaaagctggtccaacggatcatcaacacgcaaggctacgagccgtgtaagattcccaccgctgatctgtacgatagttttaagtcccgctggtgcgtgaaaaattctaaagtgcttcaccagtatgaaactgtagaacctgaggaacagaagacacttgatgaagattttctcgaccgattctccgaagaagatgtcaaagcagcgatgaaaaatatgaatattgatacgtccccaggacctgatcatatctacatgcggacattgaagttggtgaagtgcgagaaggtgattgcgctgttggccacaatcatgcttcaatggtcttacgtacctaagattatgaaagaggctaagactatactgatatacaaagggggagacaaatccgacccgggaaattggagacccatcagtattcaatctataatcaggaggatcatcgagcggattctggaccgccatctgcgcaagttcatcacttttaacaacaatcagcggggcttcaccaagcactttggcaccctgatcaacacaaacattttggacggatgtcttaaacacgccaaaagtagtgaaaccgatattacaatcgtccttctggatataattaaggcctacgacaatatcgggcatgaccacctcaagaactgtttgctctccgccaagctgcctagcgtcctccgaaacctgatcataaacctcatcgacgacaactttaccaggattcaggcctgcggcagccaaagcaagcctatttccttcttgcggggagtgctgcagggctccccactgagccccagcctcttcaacctttcaatcgacttcattctccggcaactgtctgagactgaattgagtgaaaagtatggtttccagctcacacctgaattgccaaatctgagcgtgactggattcgctgatgatacctgtgtcatagggaatagcaagggctctgccatcgagcttacttctatggctaaacacctgttcaactcaatagggctggacatatccgctaagaaatgtatcgctattaccctcatcgagggggagctgttggaggacactctccagatcgataacgaaactaccattaggtctattagaaacaacgagtccgtgcgatatttgggcgttccatttaccgatgagattattttcgatgaaaagaaggtgatctgtaacctgaagaatgatttgaacaccctgtcctccagtgcagtcctgaggccggatcagaaactcaatatcctgaatcagttcatctgccccaaactgacgtatcctttccaaatggcaccattcgccaagattaaaaaagactttctggaagatgtggacataatttttcggtccacaatcaaaactattattggtttgccgaacgatacgcccaattcaatgctgtatagccctcgccgatacaaggggctgggcctgctgagagcaaactgggaatgctacatccagattatcaatagttgcgtgcacctcaaaaaagagagcaaccctcacatcaacttcacgaggtgcctcgacacagatatagagaaatgtagaattgctttgaaactggaagacaattgttctgcattttctggcaatgagaaaacgctggggcagcgcatccgcaaccacctgcggaataaagagttcgatatttggtgcaacctgaaacagaaaggcatcggcgtgatcctttacaaggaatgtccaaaatctaacaactgggtattctcaaaatttgggcttagttgttctgagtggacaaatgccatcaaaatgtcctgcaacacactggccgtccgcagcattcccggaaggtccacagatggaccgctgtgtagacacgggtgcaaagaatctgagactctgggacatgtgctgggtagctgtcccaaaaatagtttgctgattaatgccagacaccacaaggtgcgaaatttgatcgccgaggctctcagagtgaagaagtttgaagtgctcgaagaagttacttgcgtagcgctcaacgggagcacacgccgggtggacatactgtgtttcaatccagttacccggaaagggtggatattcgaccccaccgttagatttgagaatcatgagggtcaggctctcgaggtagatcaggagaagaaggcaatctacgaaccttgcataccctacctgctctcaaattacaatcttcttcatctcgacgttattgggttgtttatcggaagcaggggcacaatacccaaatttttcgacgagtttaggaagtccatgaatctcccccattcactgacagaggacatatcactcactgtgatcagatcttcacttcacattcatcataatcacacctataatcccatcgatatctaa

SEQ ID NO: 1677 - DNA, 4704 bp, synthetic construct
  source 1..4704: mol_type = other DNA; note = FH-MCP-MG140-129
atggactacaaagacgatgacgacaagtacccctatgatgtacctgattatgctgccagcaatttcacacagttcgtccttgtagacaacggcggcaccggggatgttacagtggccccgagcaatttcgcaaacggcgtagccgagtggatctcctctaatagcagaagccaggcttataaggttacatgctctgtaaggcagtcttccgcacaaaatagaaagtacacaatcaaggtcgaagtgcccaaggttgctacacagaccgttggtggagaggagttgccagtggctgggtggcgctcctacctgaatatggagttaacaatccccattttcgctaccaattcagactgtgaactcattgtcaaagctatgcaaggtcttcttaaggatggtaacccaattccaagtgcaattgctgctaattcaggcatttattctggcggcagcagcggcggctcaagcggaagtgaaacacctggaacttccgaaagcgctacgcctgaatcttctggtggatcttctggcggatcttccgcatgcgtcgacgagagctggggcacgcttaccctcgaaggacagcagtggtaccggaacggggaccccatatctacaggtgatctggattattatctcaccgattatgctgtcccaagctcatcacagagggacggagataccgggagcgacacggagtccgattccgaggaagacgatagaccacagactgaagctgatgggttgtctggcgatgagcacggcatcattctggaactgccgtccgccacacagcagtgccccaagtgtagcgtggtcttgaataccctgcgcaccctgcaagaacatctgggtgcaacgcatggaatccgggacgtgctgtttcgatgccggttgtgtaaaaacatttttgatcgcgttcaccggctggaatgccatgctcctcgatgcaagaaagggaccaggaccccgtctggggctggcctcaagtacatctgtgatgggtgcgcctgccggttcccaacaaagagtggtaagtcccagcacgagcgccaccgccaccctgaaatagccaacaacaggagaatcaaagccacggagttgatcgccaaacagaagagagagaagcggcacgccgctaagagattgaagagacaagcagccgagtctgaacaagaggaactgcttgctgctaaagagcgcgctagattgcaggcaaaccgggagcgcgaggctatcctggtgggggagaagcccggagaggcaaatgagactagagtgttgcgcaccgaatgggacgaggtagcgactgagatttttctggatatatactgtgagatgggcgatgagaagggactgcataccagggtcagagccgccttgcaggtggcagggtacgacatccctctcaagagaatttccgagcgaaagcgcacaaagggtttcagatttgccctgctggataaacaggaacaaaataggaaagaggaagaggtcgcgcctgaccaggcaggcgaggcggctcgctccactacaaaagcttatccctcaggacagcaggccgaccataatgttgaatgtatggacacagtcaccgctgagactctgttgctcagtctcgagcgagaaagcgaagcacgaatcttgcaaactaaatgggacaccgcagctattaagattctcatggactactattgtataacaggtgatacaaaaggcctgcacaccagagttagggccgcactgcgagtggctggctatgatatttctcagaagcggatttctgaacggaagagaacaaagggcttccaaaaatccctgcttgagcgacagaaaagatcaggaatcgagcaagaagtggctcccgagcagaccggggaggcggcaaggtccacccccaaagcatacacatcaggtcagaaaacgacccacgccaccgagtgccttgactctagtaccgtggagaccctgctcctgagtctggaaactagtggggatgaaccagaggccagaatcgccgctttgtgcaggaccgtccagaagacgggaacagagggagaagctgccgaagtagcctacgccgctcatgaacagctgcttaatgacttcatagcacctggacccatggcgcctaccaagggtgccaaaatgccacgctatcggaaggagaccaaggtgagaaaaattcgcactaaaacgctcaaagggaaagcaaaagagcgagtggaacgatacaggaatctgcagcagaaatggaagagaaacaagaaaaacgcagtcaagcaagttctggacggcgcgagcgacgctaagtgtcaaatcgatgcggaagttatcgaagcaacttatgccgatagattcgagagtgcagggcccagagtggacctctctaattaccccgggcctttcagcgagcccgttctgcccaaaatcgccaccgaaaccggatccgatcatgaaaaacaaagtgggcagaacagacagagtgaaccatgccctaagaggttgctcgaagccgtgtccgcgtcagaggtgcggaaggcagtgagggcaatgcgaacaggctccgcttccggtccagacaggattactgtggcacagttgaaaaagaagacggaggaaaatcctgggttcctcgccggcgtttacacactctggatgatgactagcaaggtgccggagaaactcaagactagcaggagcctgctgctcccgaaaggtaccacagaccttcaaaacattgggaattggcgaccactgtctatctctagtgttattatgcgactgtacacgaaaatactcgctaaacggcttaccaaggcagtgtcactccacccctctcaacgaggcttcatcccagcccccggcgtagagcaaaattctgtgctcctggaacacctgatcaggaagcagaaaaaggaaaagggaaccctcgccgtggcattcttggacctggccaaggccttcgacaccattagccacgatttgtttgctaagggactgcaacgcctgggggtgccctcccagtttattcgggtcgtggaggatctttacgacggagctaccacatcttttactaccaagaacggagagacgaggcaaatcgaaataaaccagggggtgaaacaaggtgaccccttgtcaccaattctctttaacgtatgcctggaccctatgttctgtagtcttgaacgagatggcaaaggctggggctcagataaaacttctatcaccgctctcggctatgcggacgacaccgcagtgcttagtgatagtcgggctggtcttgagaagaatttggcccttgtaaaagccttctgcgatcaggtgggcttgagactgaacgtcaataagagctacgtatttcacatcaagtccgatgggaggacattcactgtcaatgacacggccccctacgagatagacggcggccgaatcccatgggtctctccagacaatgccacacgatatttgggcaagatgtttggtccttggggaggaatgtcaattcccaacatgaaacagcagatcgaagaatgggccaggagtgtcgctgccgccccgctgaagccgatgcaggccttggagatctggagggacaccatcctgcctcgaattaaggcccgcattctccattcccggccaagcgcggccctcctgaagtccctcgacatacagataagggggcacgtgaaaactctcctccacctgcctgaacaaataagcaacgccatgatatacgccaagactcgcaacggtggtctgggtatcgcgtgcctggaggacgatatacctgatttgactattcgcgggctgcacaagctgtgctggaaggcgaagagcgacacaatccggcgccatgcccagaatctgggagttcgcgacacactggaggatctgtgcactcgctatccacagtgtaagccggccgagcctgggaataagaagcgagaggaagaggatccccagcgggaccgggctattcctcggagcaaatggtgtgaatatttggcatcccagaagactcaggggatgggtagcaccacttggatgaaatacaaggagtgcaatgcctggattcgagcaggcacatttagcaacggcgagaccattgacgcaatcttgctccgcgcgaactgtatcccaacccgggagtgcatcggcaggtatacacagtccaccgatacaatctgtcggagatgcggcatgacaactgagacctctggacatatttccggctggtgtccctctgtcaaaagatctaggatcttgaggcacaactcactttgtaagatcctgggaaacaaagctcttaaacagggatggacagtgcattgggagcctatcttgaacgggcccaaaggcaaattgaagccagatctcatcttcgtcaaagatgaagtcgctgtggtggtggaccctactgtgatttgggagtcagacgcggaatgtctcgtgaaagccgcccaggtaaaggtcgctaagtatagctaccttgaaactcagatcaaggaccgcttcgaggtcactgaggtgcaggtttttggactcccaattggcgctcggggcggatggacacccggcaatgaccaggtactcagagcccttgggatcccagttggccagacacgccgagccctgtcagttagggccctgggaggcacaattacactgattagcctttttttcgatcaggatatctaa

SEQ ID NO: 1678 - DNA, 3840 bp, synthetic construct
  source 1..3840: mol_type = other DNA; note = FH-MCP-MG140-131
atggactacaaagacgatgacgacaagtacccctatgatgtacctgattatgctgccagcaatttcacacagttcgtccttgtagacaacggcggcaccggggatgttacagtggccccgagcaatttcgcaaacggcgtagccgagtggatctcctctaatagcagaagccaggcttataaggttacatgctctgtaaggcagtcttccgcacaaaatagaaagtacacaatcaaggtcgaagtgcccaaggttgctacacagaccgttggtggagaggagttgccagtggctgggtggcgctcctacctgaatatggagttaacaatccccattttcgctaccaattcagactgtgaactcattgtcaaagctatgcaaggtcttcttaaggatggtaacccaattccaagtgcaattgctgctaattcaggcatttattctggcggcagcagcggcggctcaagcggaagtgaaacacctggaacttccgaaagcgctacgcctgaatcttctggtggatcttctggcggatcttccgcatgcgtcgacgaaagcaacaccagccgagagttgggaaccctcccacctggggacgggcgagtcggtcttggggcaaccgccttgacagtaatgactagaaccgaggtggatcatgagaccgcaacacgccctccaggaggtaggccagcagccgaggtgcccagagctgcagaaacgaccaacgtgtgtcctaatcaggcatgtaaaaggtggtttcgaacccctgccggcttgacactgcacaggagaaagtgccaacccgatacactggccgccgagcgattgtcccaacagccaagacggcgaaactggactctcgaggagaaagccctgatacgcgcccgcgcatttgaactcaggaaagccgacggctcattgccttgtaccacactggcccggcttctgattgagcgaggtgattccgacagacccatcgagtctctgaaacgcctgatcatggcctttgatcgagacggtcttttggctcctgaccaaacgattcctagagaaactagagagatcctgaatgagagtgcagaaaggcccctcgtggctgatccccttgaggccactggcactctgtctgacgccacaatgccaaccgactcacagggacccactgcacttgacgacagggaagtagacgtggaatcaccagtagctgcctggcaaaggcgctctctggagacactgatgacgtggcagggcgaagagaagtccgttctgccgcccggggatcttgctgcactgtccgaagatgccattactattgcgtttgaagagtggctcaaggggcagggttggagtccgccagcagctcccccacgccggaagaaactcaccaacccggtatctaagcccttctctaaacgcaaggctcgagctgctatggttgagaagacaagacgctggttcgataagcagccacacagaactgttaaggccatcgtgaagggtaccttcgggctgaccgatcctaagcctgcagctgagactgtcgagttttgggccaagtccctctccacacccgtagaagtagacgaggtgcacctggaacctatggctccagctaattacgccctctgcaatctcattcagcggtgcgaagtagtggccgccgcaaagaccttgcgggccaagactgcccccggcccggatgggcttaccgctacgaaggtcaaaaccctgccagcgggtcagttggcccagtggttctctttgtttctgtttcggggattcgtgccgcggcgcctgaacgatgcccgagtgacattgatacccaaggtggcagaacctgcgggaccaggggactacaggcccatagctgtgtcaagcgtcctcctgaggctctttcataaaatcctggactatagactccaggctattcccctcaacaatgatcaaaaaggattcaagcagtgcgatggcactcgggatcacagttttctcctgagaagccttatcaagcatgtgagggcggagaaagagtccctgatggtgtgctttattgacgtcaaaaatgccttcggtgccattagccaccaagctgtgatcgaagcagcccgcgcaaaaggagtgcctcctccaatgctgacatatctgcagaacctttacgccaactcctttttggacttcggggatggccgcgcctcagtgaagcttggtgccggagtgaggcagggcgatccaattagcggctccttgtttaatctggcagttgattgtgtgcgcaggggcctggaccccgctgtaggcttccgggtcggaacatccaacgtccaatccctgctcttcgctgacgattcagttctgttcgcatctacgaagcctggactccagatccagatcgacagatttgctgacggcctgaaacgcttgggaatgagtttgaatgctaaaaagtgcgcgacattgtgcatccatagaacctccctcaataggtctgccgctgtgcacgtggaccctctgccatgcttgggctttggcggggagaaattccccgctctgagcagctctgatacctacagatacttgggggtgaaggtggggttcggagggacagacacaagcttctggagcgaagaattgaagactcgattggaccgcctgaacaagagttatttgaggcctcaagagaagatgttcgggctgcgcgaggtggttattcctggtatgatacacagtttggttctgtctgaagcaaccaaaggcctcctgagacgactggatacgcaaatccgcgagatggtgcggagctggctgcatctgcccaaagacactcctcttggattcctgcacgcgcgggccgtggacggtggattgggagttcccagccttacggccaggatacccagactgaggtcagaaagattgataaagttgaaccggcccggctactcagaagcgatgacagcagtgctcgagactcctacaggtagtaagcttttggattccgctaccaagctccatgggtggccggagaagacccggcgaaaacaggtcaaacagctgatctgtggcaaggcctctgaatttgaagccgctaaacagctgctgtggaacagtgtggacggctctggactcaaagagattgggtcattctcaagtggagccggagggaagaatgaatccaaatgggtcaccgaccccgtgcgatatagaatgagcggcggggaatatgtccgggctatcctcgtcaggggcggcttgctgaagaccggagaaagagcgactaggggcgttggccgcgagggccagagaacatgcagaaggtgtcggcaggtgcagtctcttggccacatcattaataactgtccaatgacccatggattgcgggttgcccgccatgatcgcttcgtgaaatgccttaaaagtgctttggagaaccggggatggaaggtccagattgagccccgggtgaagctggccaaagggagcttcgtcaagcctgatatagtggctgccaagggcgatgaagtcgtcgttctggacccatctatcgtcggcgcgaaagtgccggttgagagggcccagtgtgcgaagaagaatctttatgatcgagcagaggtgaaagagcacgggttcgagtttgccatgagttgtgggtttaaaccaaaaagcttcgacgtcgcgggtgtaatcattagcttccggggcgtctggagcctcatctcctggacccttttgcgacggctgggtctgccagttcgactgctcaacttttgggttatccggctgcttaatgacgcatactacacttgggcctcagagttgctccacagggcgggcgatatctaa

SEQ ID NO: 1679 - DNA, 4191 bp, synthetic construct
  source 1..4191: mol_type = other DNA; note = FH-MCP-MG140-133
atggactacaaagacgatgacgacaagtacccctatgatgtacctgattatgctgccagcaatttcacacagttcgtccttgtagacaacggcggcaccggggatgttacagtggccccgagcaatttcgcaaacggcgtagccgagtggatctcctctaatagcagaagccaggcttataaggttacatgctctgtaaggcagtcttccgcacaaaatagaaagtacacaatcaaggtcgaagtgcccaaggttgctacacagaccgttggtggagaggagttgccagtggctgggtggcgctcctacctgaatatggagttaacaatccccattttcgctaccaattcagactgtgaactcattgtcaaagctatgcaaggtcttcttaaggatggtaacccaattccaagtgcaattgctgctaattcaggcatttattctggcggcagcagcggcggctcaagcggaagtgaaacacctggaacttccgaaagcgctacgcctgaatcttctggtggatcttctggcggatcttccgcatgcgtcgacgtcgcaaaactcatctccaccaggatgcctaataaggagagaagcagggaccctccagcatctggatccgttgtactccccgctgacaagtctgtggagtccgctcctgcaaccggacgccaaacgaggacagcgaagtctggctctgccgtccagctcacatgtggaaaccctcccgccgggaatgagcgaaccaagtccaatgccgcctctacctcaaaccctccctcaactgatggaggggctgtccggtttcctagcacccagcatagagagcatgagatggatgtggtgaatgttccattcgtgtgtgagggaaatacaacacatcgatgcatacagggccagtgcgtggaggagtttctggagttcaagctgcttgcaaaacacctccagcaagcccaccgctggagctctacgcgaatcgaagctatccagttcgtgtgccggctgtgccaggccccctggccaaaactggcctcagccacaagtcaccaccggtactgcaagatggccatgggcaaggcacacgctggtggccacggtcgccccgtgcgcgacaataccgtgactgccagcgacttcgcctgcgccgtagacggttgtaagttctttgctaaaaatgccgccggcttgaaagtgcacaaagcccggttgcaccctacagttaggaacgcagaacttgccatgccgactggccggagtctcccatgggaagcggaggagattaggctcctggccatgcatgaattgagcgaaaatagcgcccgagggtggattggaaggttcgttagctctcgcaagctgaaccgcactactgacgcaatacgctccttcatccgaactaacgcatatagagaggtgcgcgacctgctccgcgaagaaggaacaggacctaccagagctcttgcccctgaggtgaacacccccgaggtcgccccatcagagcccccgatttctgtggagtctacaaggtccatttccaggagccgcctgttggagcaactgagaaacttgctggatgaggaagaagtatcagaatgcgttcgagtctatacccgcaccgctatcacccgaaaagaccccgggtgcgggttcgaaagcatgttgggaaagctgataccagtggccgagaccgctaggcgcgtcacgcagccgacccagagtccactgcctaaaaaccgcaaggagagaaaaaaggcagaatacaggtctttgcagcggctttggaaacaggatagggcacagttggcccaggtcgtgcttgatgatatgccaacaaatgtccaagagccgccactgaacctggttgaggaggctttcgtggataggttcgagaagacgtctcctgaagacgtggagccctttgaacccaatgcttgcgacgatccacaggggttggtagacttcattggcgtgaccgaagtcagattgcatcaaaaaaagcttaaacttagaagcgcacctggccttgacacctggatcactgctgaacggctcaaagctgtctcagcgtgcgatctggcggcactgttcaatacctggttgtacctggaatcagtccctcagccactgaaggctgctcgaaccaagctccttcccaagtccaaagagaacctcggagacataggtcagtggcgacccattaccattggcagccaattgctgcgcctttactgtaagatcctggcctcccggctgcagaagcgcgctcatgtccaccctatgcagagtgcctgccagccgcatgatggagtgggttacaatacaaacctgcttaacgagatcatgcgggacgctagaacaagacggaagagtgtgtttatcgtgtggctggatatagccaaatgtttcgacaacataagtcacaagaccattgaaagagctctctcccgatttggtactcctcagcactttaagaacgtgctcagtgacctttatgctggagcaagcacagttatcaggactgctcatggggagacaaggccaattagtatccgatctggtgttaagcaaggctgtcctttgagcccaatcctcttcaatatgatcgtggacgagctctttagaaagctgggcagcgactgggggtacgaactgggcgaccacaaagtggcagctgtgggctttgccgatgacacaatcttggtatccggctcacagatgggcgcttcaaaactgctggatgaaacttgccggtttttcggggcgagacacttgaacattaacccaaaaaaatcccttggctttgggatggttcatcccccaaaggcgaaaggcaagactatgaaaatcctgactggttccctctggaatgtcgctgggacgcccatccccatgatgggggtggaggaaagcacacgatatttgggcgtacagtttggagcacgcggacggaaaaatgccgacttgaccgagcttagagtttggctggaacgcgttaagcggtctaacttgagggtcgcacaaaaattctacctcatcaaaacaaacgtcttgcctcgggtgagatggcggctggtgaacggcaacgcaaataagatgacggtgcgaagagccgatgccctggttcgggagatggtcaagcaactgttgcacctgcccgtgggcaccgccgatgacttcctgactctgcgggttactgacggaggcctggggctgtcccgactggccgatagtgttacaaaaggcaaacttaagctggcctatcggcttcagagtgcagatgaccccatcttccgctctgttgcggaaagaaacctgtcttcccatgatactcgccggtgtttgagagattttcagctcggggccatagatagaccgtcagatattaataaggccgccgagagacagtatatggacagaaaggaagcctttgggaatacgagtcaggggcgatgccatcagcacctcgctaataatggcaacccatggcttcattttgacaggggatctttgagggctaacgattttattgacgcgtgtaagctccttactgagcaactccccaccaggagcgtagtgtgtcgcaaggcccctgaactggatcagaggtgtcggggttgtctcaaggaaaaagagactcagaaacatgtgctgcaatgttgcccgatcacaaagcacgctaccatgtcccgccacaatcggatcgcggactacatcgcaaatatggtggtggaacatggtaggggattcagagtgctcagggagccaggtattaggaagaagatttccctgacggaggaaaaacttcacaaaccagacctggtgtgcatttcagaagatgacgagcctggcgaaagcaagattgtggtcatagatgtggccgtgagatacgaagatgcaccccacgtaatggacatggtcgcggaggagaaacaccgcaaatatgtgggactgaccgaaacccttaggacactctttgagcgaccccatgctgaagtaatcataggttcaattgtcgttggggtgaaaggcgccctgtggcttggcaaccagagatttctgaaccatctcttcggggcggagcgcaagatgatcaatgcagagattagccgactcgccgtcctggggagtgtcaaggtatggcacgcattcatcgaggagacaattggaaggtggaagcggaaggatatctaa

SEQ ID NO: 1680 - DNA, 4296 bp, synthetic construct
  source 1..4296: mol_type = other DNA; note = FH-MCP-MG140-136
atggactacaaagacgatgacgacaagtacccctatgatgtacctgattatgctgccagcaatttcacacagttcgtccttgtagacaacggcggcaccggggatgttacagtggccccgagcaatttcgcaaacggcgtagccgagtggatctcctctaatagcagaagccaggcttataaggttacatgctctgtaaggcagtcttccgcacaaaatagaaagtacacaatcaaggtcgaagtgcccaaggttgctacacagaccgttggtggagaggagttgccagtggctgggtggcgctcctacctgaatatggagttaacaatccccattttcgctaccaattcagactgtgaactcattgtcaaagctatgcaaggtcttcttaaggatggtaacccaattccaagtgcaattgctgctaattcaggcatttattctggcggcagcagcggcggctcaagcggaagtgaaacacctggaacttccgaaagcgctacgcctgaatcttctggtggatcttctggcggatcttccgcatgcgtcgaccggtctaaacccaccttgacaggcaatagcactctgatgatgatccagaacactgacaatgcgccatgccttttcagcggggatcaccagagatttgaggtcgccgctcggggagtgagctgtaccacacctgtgtccgctgccgtcactaatcgaaggagggtgcggatgagccccgatgttgtttctatagtaagtccgaacatgaagcgccagagaccagcacacatcgtagaccttgatgacgtttccttggaaagggagttgaatacggaggaggaggagacccgcaaggaggcagccggaagtctcgctgccgaaggggtcagtccaaaagaagcccaagccatcgtggacaatgagcagctggtggctctggccagccaatcagcgcgaaacgagagaccagtggacgtgcacgtgtgcttctgtggggcagctttcagatctgctaggggcttgggccagcataaccgacaccgccaccctctggagttgaatgaaacccgaaaaaaacttctcccatttcgaaagagagtatgggaaaagtacgaagattctgctctgatcaggctggcaaacgaaattgctcagtccaatacgacgaaacgcgatctttcatatcaactgacagcccacttcctggggaggtccgctgaagccatcctgagtcggctcaaggtgcttaagtggagtaatgaccgcaaacagccgtcctctattagacggaacctgatgcagcctggtgaggtccactccctcgtccagagcgaacatgacaccgaaactcatgggccccctcaacaaccaccagtacagatacagtccccggtcgatgtgcccccaaccagtacagtcaccggtagccaggaggtttcttgtaacggagccagccgctctgaagcttttcagcagctctcacgagagcaggttagctcttgtccttccatcgagccggcaattttcaacgctatatgcgaaagctcaacggtgctggactggcctactagggggccacgcggcgacggtgctgataacgagattatcacagaccacgcattgggtagtgctatctccagctggcctcataacattagtacacccacacatagcgatcgggaaccagagtacagtaactggttcgactccttcattgcaggcgtggcttcacgacttcgcgagatcatagaggatcagaagcctcagtcaattgagcctttgcgaggacaggagttgctgacggtggctgagaatctcttgagcggatctttgagcctcaagagagcccgcaaacagttgtccaaacacgcatccatttgcttcccgcacctctggaagcccaccgataagtcaaagtatttgcgatctaaaaccctcacaagcaatagggccattaagcgagccaactacgcggccgtgcaggccctctatgccatgaataggaaggacgcagcgaagatggtgcttaaaggcgattggaaggaggcctacaaaggcagaggtgctgaaccaagaggatgccatgcatactggtccgaggtatttaggagccccggcgttcgcgactgtaggcctgtgcataagattagctccactttgtggtctctcatggagccgttgacaaccgccgaggtcacaaatactttggcatcaatgggagacaaggcggctggactggacagaattaccctggctaaagtcaaaggtttttctcgaatgcttctgaccgagtatctcaacctgcttttggtcacagaggcagcgcccgtccagctgactaaagccagaatcactatggtacccaagattgccaagccctccgaacccgccgatctgcgaccaattgcagtcagctctgtgctgcaccgcctgctcaacaaagccctgagctgtagatggtctaaatccctgaacttcaatagttaccaagttggctttcaacctagagatgggtgctttgaggccacgctgcttctgcagaccattatcagaaccgcccaccagactaacactagccttgcctctgcatttgtggacgttagtaaggccttcgatacagtgtcatacgatacagtgttgcgggctgccgccgcatatggggctccttctccacttgtcaattatctgagaagtcagcaaaattcatcattcgttaccctcgacggcaggaaggaagtacggtgcaaacgcggggtgcgacagggtgatccactgagccccatcctcttcgtgatggcgatggaggaggtgctctctgccagtaagcctgaaatccgctttgaaaagaaggatctgaaggtccacgcgcttgcgtatgctgacgatctcgtggtgtttgcaggaaatgagacagaactccgggagaaactggttgagcttgaacgggctcttgcaatggccggaatgcagatcaatgtgaaaaaatcaaggggcctgaccatcaaggccaataagaaactgaaacattcagtcctgatggataccgagtacaagttgctgaacgacaacattccaccagtagggacagccgacacattgaaatatctgggtctgtccttcaattggaaggggcgcgtgcctgtgaagcatactggcaagctggattctatcctgaccgaagtctctcaggccccactgaagccccagcagcgggttgaaatcttgcgggacttcgtggtgcccaaacttctttacgaactcgtgctgggcgatgcacatagaaataccctcaagaggatggacattatgatccggacccggctgagggcttggctgcgatttccaaaagacgccgcaatagcctacttctacgtgcccacttctgagggcggcctcggcatcatgcggctggggacttctgttcctcttatggccaagcagcgattgcaaaaaatgctcaacgtggacaacaacataaccagtgtactccggggaacgggcgaatttaggatgcagcttaggcacgccggaagaccgattagagtggagagtgaaatcgttactactaaggtagaatcccataaggccgaactgtcatgccttaaacggaaactggatggtagggacttggccgtgcctgatgtagatcccgttagccacctgtgggtgcgctacccacaaaatgtcttcccccgattgtacattcgaagccttcagctgagagcaggagtgctgcggaccaaggtgaggggctctaggggccgcgttcaagtccccggcacaatgatgaattgtaggggaggctgtggacagcctgagagcctgacacacatcttgcaacggtgccaagttacccacgacgggcgatgcgcccggcataacagggttgcagaagcagtcgctaagaaggcgaaagcttcagtcgaggaaacctgggtcgaacctatcattcccgtacctggatcctttagaaaacccgatttggtctttcgccagggaaacgtgttgcgcgtgatggactgcgccataacaacgggcgagcgccttgaggtcatgtggagagagaaagtggacaaatatagcaccgaagactgtaagactgggatacagcagaccctgggctccaactatcaggtggtgcattgccccatcatcctctcataccgagggctgatatataggaagtccgctgctgcactcagacaactggggctgacatcctgggacatttccgatctgtgtctcttggcgatccggggtagtttgaaggagtatgacgtgtacatgagagggactgatatctaa

SEQ ID NO: 1681 - DNA, 4029 bp, synthetic construct
  source 1..4029: mol_type = other DNA; note = FH-MCP-MG140-138
atggactacaaagacgatgacgacaagtacccctatgatgtacctgattatgctgccagcaatttcacacagttcgtccttgtagacaacggcggcaccggggatgttacagtggccccgagcaatttcgcaaacggcgtagccgagtggatctcctctaatagcagaagccaggcttataaggttacatgctctgtaaggcagtcttccgcacaaaatagaaagtacacaatcaaggtcgaagtgcccaaggttgctacacagaccgttggtggagaggagttgccagtggctgggtggcgctcctacctgaatatggagttaacaatccccattttcgctaccaattcagactgtgaactcattgtcaaagctatgcaaggtcttcttaaggatggtaacccaattccaagtgcaattgctgctaattcaggcatttattctggcggcagcagcggcggctcaagcggaagtgaaacacctggaacttccgaaagcgctacgcctgaatcttctggtggatcttctggcggatcttccgcatgcgtcgactccggaaaccagggcagcgcctctaacggcagcccagttaagggcttcccatgtcctgactgtacacttgtggcgaaatctaagggagcccttgcatcccatcgacgctggaagcatcccgtgcccccatctgtttcatccgacgagctggagggcgccgtgggaggggtgcccgttctgaccccacagacggacggccagaatcagggacagaatccagtgtctggtgcgtcaggcttggttattggctctaccgctacaggaaccgtcaaaggcttcgcttgccccaattgtcctagatctttcgataaatcaagcggcttgagccttcaccggcgcaaggctcacgcttcaatcttccacgccgaatttgtaccccctgtgctgaccaaagctagatggtgcaccacagagctcacgctggtggcccgggaggaaatacgcctgtctaggattgcgggcaagagggctactgtcgcagctatcgccgcgtgttttcctgacagaacatttgatagcctgaagtctttgcgccggaatccggagtaccagcgaatcttgtctgaagttgaagagcgccttatagacgatccttgtagaactggccccgaagatggaagctcccaatcactcgtgtccccaccgaacgtcacaacgcaggcaagagaatcagacgtgggagtgcggacccctggcccattgagccctgccacgatgacaaactctctggctgatagtctgctgtctggcgagggggccagcgtttgtagcgctccctgtgagcaaatgaacacactgctcatcgtgctcaaggcaaaccgacagaagtttcacctcgacgatcactccatggattccctcgcttccgacctggccactggactgcgatccagcaatccagcacttctgcaaagcctgattgatacagagtacgacggatggctcacatatttggacaagacctatgggccatttaagaagccgactctgtccaagccgggaggacggtggatccctcccaaaatcgactccaattgcaggagcagcaagaaacttgagagaagaagacagtatcgggaagttcagcgactgttcaagaagaatcggtccaggtgcgctgacttggtgctgagtggagactggagtaaggaaccagtggaaattcctttcgaagaacaggagtctttttggggccccctctttgagactcagtcactgccagacagacggcgcccagacccgatcagtcctccaattctggagctggtagacccaatcagcgccaccgaatatagcgatagtctcaaaagcctgaaagatggctcacctggcgtggacgggatggatcgggcatatcttagaggtattgatgccgaggactgcatcgcgcattttcagctctggcttgccactaggacccctcccctggcttttaaggccgggatcactagtctgatacccaaatctgccgactcaaatagccctggtcagttcagaccgattactgtatccgccatcatcagccgacttttccaccgcattctcgcgtccaggttggagtccctggtccctttgagccccagacagaaggctttccggcggggagatggtctccaggacaacgtgatgatcctccgaagtctgataaaagatagatgtaacaagaataggcccgtctccctcgccttcattgacgtcgcaaaggcttttgattccgtcagtcacgaaagcttgattctggctgcagagcgagtgggtgtcccatctatcttgcttgattactgcaggaacctgtattgcgggggaacaactagcctcaaatacggccgaagccaatcttctagggtgatctccgcgcgcagaggggtgagacagggggatccactgagccccatactttttaacttcctcatggattgggtgctcagtgccctggacgataacctgggacttgccatcaacgacaatacaagggtctgccaccttgccttcgccgacgatctggtcttgctttccgaaagcgttgatgggctgcggacgcttgcccgcgattttgagatcgggctgtccaacgtgggtttgctgcctaacgccaagaaatcagctaccatgagaatcttggtgagcggaaagcggaagaaatgggtcatcgacccgaagcccttcctgtctttgggcggtgttgaagtgcccacaattgggatcgatgggtattacaaatacctcggcttgtctatgactgctggaaaaccccacgcaagagccagcgacagactcctggaccacctgagtcaactggaccgggcgccactcaaaccgcagcaacgcatgtactttctcaaagtgcacgtactgcccggactcaatcatctcttggtgctggaccctgtaacagtgagccagcttcaacgacttgacatcgccgtcaggcgccacgtgcgaaagtggctgcgcctcccccatgatagtcccaattctttcatccatgcatccgtcagtgacgggggattgggtgtttcaagtctgcgaacaaatattccattgctgaagcgcgataggatcgaccgccttatatcaagggtctcaactgggctcgacccagttctggaggccgtgtacaagacttcccgcttccttaacgacgagattcggcgatggtctcagcctcgatctttcaccggtaggctgatagctaccaaagaggatgcccgcaatgttcaggcttccagtctgcacacctccgtcgatggccggggactgcgctttcacaacttggtaccttcatctaacgactggctcaccaataccacatctgtgcaatctggcaactcattcattcattgcgtgcagatgagggcagcatcccttcattgtgccgtgagggctgcacggggcaggcctggggcatcaatgaaatgtgatgcttgtggcgagctcgaagggcttagtcatattgtacagaggtgttgcagaaccgccaggccccgcgatgggaggcatgattcagtggtgcagtttctggccaaaaaattgcttggtccatgcgaggtactggtggagcctacgatccctactcccagtgggatcaaacgacccgatcttgtcgtcttcgtgcccggccaatgggcaaaggtaattgacgtaagcatcgtcagtgacgacatccacccagatatagcccatcagcggaaggccgactactacagtcgggagcctgctgtggtggcctgggttgccttccggaccgattgcctcgtgtccagcattgacttcgcgggcgcaatatggaactggcgcggtgcactttcaccggcatctgcaaccgttctggctgacattgggattaggaaaagcgatcttaatattctgaccatacgagtcctggaacaggggtttaagtgctggagaacctttaaggattgcacttggttgggcggtcgaaggagacggagacgcgccttgtctggcgatatctaa

SEQ ID NO: 1682 - DNA, 4260 bp, synthetic construct
  source 1..4260: mol_type = other DNA; note = FH-MCP-MG140-143
atggactacaaagacgatgacgacaagtacccctatgatgtacctgattatgctgccagcaatttcacacagttcgtccttgtagacaacggcggcaccggggatgttacagtggccccgagcaatttcgcaaacggcgtagccgagtggatctcctctaatagcagaagccaggcttataaggttacatgctctgtaaggcagtcttccgcacaaaatagaaagtacacaatcaaggtcgaagtgcccaaggttgctacacagaccgttggtggagaggagttgccagtggctgggtggcgctcctacctgaatatggagttaacaatccccattttcgctaccaattcagactgtgaactcattgtcaaagctatgcaaggtcttcttaaggatggtaacccaattccaagtgcaattgctgctaattcaggcatttattctggcggcagcagcggcggctcaagcggaagtgaaacacctggaacttccgaaagcgctacgcctgaatcttctggtggatcttctggcggatcttccgcatgcgtcgacgtccaatctatggccctcagatatatttccacagcaacacagacagatcctctggacctcagggttaagaaggcagacataccttccacaccccaggagtccagtgacgaagggttcaacctggtttgtctcgagtttgtgaacacatcttatcgaagggaggtcggctttcacctcgaaaccatttgggaggggttggccgaactgcccgagccatacgagatccttccactgggtttggctcaggaagacgagtccgaatgtgtgcagcgggtgatcgaagagcctattactcccgaggcactcctgcgaccttccgaggaccggacacccccaagaaccccagtcgtcagcgtaccaggcaaaaaccctgcttgtcctcgatgcgcgactcggttcactcgacttctcggtctcatcgacccattgaaaagaaatcatggtcagaaaaagatctggttcaaatgcagcaaatgcggcaagcagaatcttaagtaccactctatagcatgtcatttccccagatgcaagggagaggtttgcgtagcccctaccggggattgggtgtgtgaagtatgtcagcgcggatttaccacaaaaatcggacttgggcaacataaaaggctgatgcaccccctcgtgagaaacttggagagaatagaagcttcacatcccaaagtctcctccctccgcggggcccacaaaaaggtgtggacggaggaggaagaggccctcctgcgacagctggttgtgacgtatgccggtcggaaaaacattaatcagctcataatggagcacataccttctaagaccgccaagcagatcagtgataaaagaaggctgttgatgaaggttccctccaaaaaagtaccaagcatcgaggagggcggagaagaaggcaaggaagatctgccccaagacgcgggtagaacgaaagaaggccagctcaaactccattactatgatgcaatcaaagagcgacttgctgtatacggttttgcttcttgtcaggaggccttcgagaagattctcgaggggcaggacccacagatggtggtgaacgaggtgtacggcaagttttttgggtccccaagcggaccctcagttttcgggaccagcactcggggcagaaaagcacaacgacctcaaggacagaaagctagtaaagtgactacatcatggatgcggaagagggcggaaaagaaggggaagtatctgcgattccagaagctctttcacctgcatagaggaagactcgctcgaattattctggataatagcgaggccgtgcaatgtcagatcccgagtgggattgtccacgctgcattcaaggctaagtgggaaaccagcgtggactttatggggcttgaaagttttccaccacatggagaggccgacaacaccgtctttcgcgcactcatcacagagcgcgagatcggcaaaaatgtgaacgaaatgggaaagactagcgccccaggccctgatggcattactcttggccatctcatcaagaaggatcccaaattctcactgctgatggaaatttttaacctttggctggtggctggcactatccctgatctgctgcgagactgccggacagtccttattccaaagtctagcgaccttggaaggctcggcgatataaacaactggcgaccgattacaatcgccagtaccgcgctgtggaccttcagccgaatcgtcagaccacgcctgactagagcctgcccaattaatccccggcaaagagggttcatacgcgcatccggctgcagtgaaaatctgaaactcctgcagcttatcgtgaggcacgccaaacgcgaaaggtgcgaacttggggttgtgttcgtagacatagctaaggcgttcgacacagtgtcacaccagcatattctgaccggccttacccagaggggtgttgacccgcacgtcatccacttggtgattgagttgtacaagaacgtatcaacctacatcggcatcaagagtgaaaaaaccgatcccataaatattcttagcggggttaagcagggcgacccgatgtcccccattctgttcaacctcgcccttgatcccttgctgtgcaaattggaaaagaacggatacgggtttcagcgggggaaccttaagatcacagctatggccttcgccgatgatctggtgttgctgtctgattcatgggatggcatgtgcggtaatatccggattctggagaccttctgtgagctcacgggactcaaaacgcagggagagaagtgtcatggcttctacattaagcctacacgcgactcttataccatcaacgattgtcctgcttggaccatcaatggatctccgttgaacatgatcgacccaggtaatagcgagaaatatctgggcatccgaatcgacccatggactggcttcgcggactccggcctggctgagaagctggaggagtggcttcacagaatcggggatgctcccctcaagcctcttcagaaggtagacatactgcggacttataccatatcacggttggtgtaccaagctgatcacacggaactgagatctggacccctggaaagcttggatctgaatattcgcaacgccgtcaaaggatggcttcacctcccaccttccacctgtgatgcaatcatgtacagctcatgcaaagatggaggattggggatcattaagctttctgtgttggttccgagcatccaggcaagaaggctgcataggctggctcagtcatctgatgaggcgctggttaccttcctcaagggggagcacctggagatcctgtacgaaaagttgtggattcgggccgggggagagaaagaaagtattcccgcaatttgggaaccgattcccgtcgaggaatgcgtcgcaagcggcggagagggcgtgagtgagtgggaagcccccgtgcctaaagttcgctatcctcggccgtgcaactggaggcgcgtcgaatttgacaagtggaagcacctggtcgctcagggacacggtatcgagaacttcgagaatgacaatatctccaacgggtggctgattaggtataggggtatcccccatcgaaagctgataacggccctgcaacttcgcgccaatgtgtacccaactcgcgagtttttggcgcgcggcagaaaagacgactgcgtgcgctcctgccggcattgtgcagccgactacgagacaacagctcacattatcggtaactgcccaatcacacaagaagctcggattaagaggcataattctatctgtgaaatcttgtctggcgaagctaagaaggtggactggaccgtcttccaggaacctcacataagggatgaatacaatgagctgtttaaacccgaccttatttttgtcaaaggtagtaaagcatttgtggttgatgtgactgtccgattcgagcatagcagcagctccctgaaggacgccgccgccgagaaggcaaagaaatatcaatgtctcctgcctcagatcaaagacctgactaatgcagcagaggtggagtttgtggggttccctattggcgccaggggcaagtggtatgccaaaaattccgaactcctgtcagccctcggtctctcaaagacccggttgggcaagactgcgcgagccttggcatctcgcgccctttttgctagtgtagatatagtgcacatctttgtgtctaaggccaggagcattgtgcctcccgaggatatctaa

SEQ ID NO: 1683 - DNA, 4350 bp, synthetic construct
  source 1..4350: mol_type = other DNA; note = FH-MCP-MG140-144
atggactacaaagacgatgacgacaagtacccctatgatgtacctgattatgctgccagcaatttcacacagttcgtccttgtagacaacggcggcaccggggatgttacagtggccccgagcaatttcgcaaacggcgtagccgagtggatctcctctaatagcagaagccaggcttataaggttacatgctctgtaaggcagtcttccgcacaaaatagaaagtacacaatcaaggtcgaagtgcccaaggttgctacacagaccgttggtggagaggagttgccagtggctgggtggcgctcctacctgaatatggagttaacaatccccattttcgctaccaattcagactgtgaactcattgtcaaagctatgcaaggtcttcttaaggatggtaacccaattccaagtgcaattgctgctaattcaggcatttattctggcggcagcagcggcggctcaagcggaagtgaaacacctggaacttccgaaagcgctacgcctgaatcttctggtggatcttctggcggatcttccgcatgcgtcgacgttctgacaataccctccaattactgtgacgagatgggcaggccgctgagggtgaattatattagcgtagctacgcagacctctccactggacctgcgcgatcctgtggccgggcgagcaactgtttgcaggggaggcgctgttgaagaaggcatgaacctttccggactcgaatttactaacagccggctttacggatttgaaggcatcgactcctccacctggcaagaaaggctgtcccggttgcctgaggtttacgaaagtttgacaagcctgcgcgtaggaggggtctccgatagtccccctcggatagaggagagtgagggcgagggcgaggcatcacccccgggggctctggcacagcctacactcctgacatctcccccgatcctggggacgtaccctgatcttccaaccgaaggcacacctgtggtgaaggtgcccgacaagaatccatcttgcccttgttgcgggaacaggatcggtaagatgagcggtttgattgaacacctgaagcgggtccacggtaaaaaaaacgccctgtttcagtgtgccaagtgcgggaaaaccaacgtgaagcaccattccatcgcctgtcactaccctaaatgcaagggggtcgagactagcccacccgtgggcggatgggcatgtgaggaatgcggcaggaccttcgagaccaagattgggctgggccaacacaaacggagcgctcaccccgctgttcggaatattgagcgaatagccgctagtcggcctaaagaatgtagtgcaagaggagtgcacaggcagtgctggacggaagaggaggtggagctgctgcgcaggctcgacaagcagtatgagggctccaagaacatcaacaagttgattgccgaacacattcccagcaagtccgcgaagcagatttctgataagcggaggggcctgcataagagtcccgttaagaggagagagaaagatcaggagaaacagaaataccttgagtcagaggggctgcacctgcccggaatcgaatcacgggttgacgggggacttagaagccattatcgaaaggtgattagcgactgggtcacatctgacaagctcactgtcctccggggcatgttcgaggaggtgatcgaaggcgagaaggatctgagtactttggtcgatgaagccacccaggacagatgcgcctgcctgttctttaagtcccatgaacttaaggcggttcaagggggtaggcctaaggtaacccgcagggttcctagtagtgagccacctaaggtttggatgaaaaaaagagccaaaaaacgaggccacttcttgaggttccagcgccttttctaccttgatagaggtaaactcgccgggataattcttgataatgtggagagccttcgatgtggaatccccctggacgaagtccatgccgtctttaaatcccgctgggaaatgagtggcacctttaaggggcttggggccttcgtgaccgagggccaagccgataattccgcattccaggctatgattactgccaaagagataagtaagaatatcaatgaaatgaacaaaaacgctgccccaggtccggacggcctgtccctccgagatctcatcaagactgacccacattacacccagcttatggagctctttaacctgtggcttgctaccggtgtgatcccagacgtggtaaaagagtgcaggaccgtgctgatttctaagtcagctttgcccgagcggcagaaggacattaataattggcgacccatcacaatcggaagcatcatcctcagactttttagccgaatattgactgtgcggctttccaaagcatgtcctatcaacaccagacagcgcggattcattaaatctagcggctgcgcagaaaatctcaaacttctccaacttctgatacgatctgccaagcgcgagcatcggccacttggtgtggtcttcgtggatctcgcgaaggcattcgacaccgtcagccatgagcacattatcatggcacttagacaaaagggagtggacgatcacatcgtatcactcatcaccaatatgtacctgaacgtcaacacccgcattcacctgaagaacgaccagacggatcctattagaatttgcattggcgtgaagcagggggaccccatgtctcctatcttgttcaaccttagcattgaccccctgctgtgcaaactcgaaagcgaaggcagcggattccagcactacgctaaaaaagtaacgagtatggccttcgctgatgacctggtactgctctccgggtcatgggaggggatgaaagacaacatcacaatccttgaggcattctgcgagttgactggactgaagacccagggcgaaaagtgtcatgggttctttatccagcccactaaggactcttacacaatcaacgattgtccacattggacaattaacgggaccccaattaatatgatcgaaccgggctcatctgagaaatatctgggggtgcgagtagacccctggatcgggatttctaaacccgagttgctggagaaactgcagggatggctgcatcaaatccactcttcccctcttaagccaatgcaaaaagtggacattctgaagggttacatgcttcctagactcttttatctggccgatcagactgacgtcaaggcaacatatctggaaacactggatctcgcaatccgctccgctgtcaaggaatggctccatttgcccccgtctacgtgtgatgctcttctgtattcaagcactaaggatggaggattgggtatcactcggctcctgggattgattcccagtgtgcaggtgagaagactccaccggatcgcccagagcagcgacgaaataacaagagaggtggcaagaaacgagggcatagagaaggagtttcagaagctgtgggtgaccgcgggcggagataaaaataagatcccgtctatctgggatccaaaaacagtgatggtaatctctaaagaactgggcggcgaagagccagcctcagagtgggaggtgccagcacccaaaaccatttttccccgaccgtgtgattggaggagacaggaatttataaattggacaaagctgctgtcacagggtaggggcataagcaattttgagaaagataagatctccaataactggattgagcactatcgcggtattccacaccgaaagattattaccgcgctccaactgcgcgcgaacgtgtaccctacccgggagtttctggcccgcggcaggaaggaccaacagtccacgtcatgtcgccattgcggggctgataacgaaacttgtgctcatatcataggatattgccctgccgtccaagatgcccgaataaagagacgaaattacctcggagagcttttgatctctgaagcgaagaaggagtgggtggtttttcaggaacctttgctccgggacaacaataatgaactgtataagccagatcttgttttcgtcaaaggtgatcaggctcttgtcgttgacattacagtgcgctatgagtctaaaccaacaagcctggccgacgctgccgctgaaaaggtgaagaaatatcaacacctgctgaaccaggtccaggaactcactaatgccactagaatcaaatttatgggcttccccctcggagcgcgggggaaatggcatcagggcaattacgaactcttggcagaccttggtctgtcaagcagtcgaagagagaaagtcgccaggaggttgtcaaaccgcgccctcttgacctccgttgacataatccacatcttcgcctccaaatcaaggactgtgacaagtgatatctaa

SEQ ID NO: 1684 - DNA, 4368 bp, synthetic construct
  source 1..4368: mol_type = other DNA; note = FH-MCP-MG140-145
atggactacaaagacgatgacgacaagtacccctatgatgtacctgattatgctgccagcaatttcacacagttcgtccttgtagacaacggcggcaccggggatgttacagtggccccgagcaatttcgcaaacggcgtagccgagtggatctcctctaatagcagaagccaggcttataaggttacatgctctgtaaggcagtcttccgcacaaaatagaaagtacacaatcaaggtcgaagtgcccaaggttgctacacagaccgttggtggagaggagttgccagtggctgggtggcgctcctacctgaatatggagttaacaatccccattttcgctaccaattcagactgtgaactcattgtcaaagctatgcaaggtcttcttaaggatggtaacccaattccaagtgcaattgctgctaattcaggcatttattctggcggcagcagcggcggctcaagcggaagtgaaacacctggaacttccgaaagcgctacgcctgaatcttctggtggatcttctggcggatcttccgcatgcgtcgactcaaggagcgtgtatcctcatccaaagcttgtaaagatgggacggccaatgagaatcgcttttgtaagtgtggcaacccagaccggaccaatggatctgcgcgagaaggtcacgacggagctgggcaaagagcacgataaggacgacgttcctgagaactcctggaactgggatggattggagtttattaattccattgccgatggccttgagtggtcccacccctccaattgggccgaaagacttgcaatgttccccgaggtctatgaaacatacaattccctttgtgcagccgaaaaggagaacgaccggaccggggagctcacaagtcagatggctatgagtcctccccgcaccccctctccggaccccaacgccgaccttccaaatcggggtacacccgttgtgaaagtacccgataagaacactagctgcccatgctgcggaaacagaatcggcaaaatttctcagctggtggaacacctcaaacgcgtgcacggcaacaagaagatcctctttcaatgtgccaagtgcggtaggacagagatgaagcaccactctattgcttgccactttccaaagtgtaagggtagtgtcaccaccgaccccgagtgcaagggttctattacaactgacccaacagtgggattcacttgcgaggaatgtggcagagtctttactagcaagatcggcttgggacagcataaaaggctggcccatccggtccttaggaacatcgaacggatcgcagcggcacaccccaaggcttccacaaagcgaggcctgcatcgccagtgctggacggaggaggaggtcgagctgctgagaatcttggacaaacagtatgaaggatgtaaaaatatcaataagcttatcgcagaacacatcccgtctaagacaactaaacagatcagtgataagaggagaggcttgggcaagtccccggaggaagaaagggaaaaggaccaggacctcgaatggaggaagctgatgaccaaggagcaagagcacccccgggggaccgggtctagcaccgaagaggggccaatgtcccaatacaaaaataggatcatggagtggataacatccgagaagctccctattctccaaggagtgtttgagaaagtgctcaatggcgaggagaatattgactgtctcatcgaagaagcagtggacgaatattaccctcatttgttccgcaggtcagctgaactcgagacctctcaggatcagaagcggccacgccccagcaaggccaatccacccgggccgagcaccgaatggatgaaaaagcgggctaaaaaacgagggcagttcttgcgattccagcgactgttctatcgcgaccgagggaagctggcagggatcattctggacgatgtggagtccctgcaatgtggtattccattggaggaagttcatgaggtttttaagtccaggtgggaaactccagggacgtttaaaggactcggagcttttcgatctgccggtcaggccgataatagcgccttcaaagccatgataacggcaaaggagatcgctaaaaatatccgggaaatgaataagaaggccgcccccgggccggacggtctgtcccttagagacctgattaagatagatccccactacacacaggtgatggaactgttcaacctttggctgctctcaggtaatatacccgacgtggctagagaatgccgcactgtgcttatctctaaaagcgcgctcccagaaaggcagaaagacataaacaactggcggcccattaccataggaagcacggctctcagactgttctctcgcattcttaccgcccggcttactaaagcttgtcccatcaacccacggcaaagaggattcatcaagtcacctggatgcgccgagaatctgaagcttctgcagttgcttattagatctgccaaaaaagagcataggccattgggcgtggtcttcgtagaccttgccaaagcattcgatacagtctcacattcccacattttgactgtgctgaaacagaagggggtggacgaacacatcatcaaactgatcaaaaacctttaccacaacattaacacccggatagaccttaagaataagcagagcgagccaatcgggatgcagatcggagtaaagcagggagatcccatgagccctatattgttcaatctgtccgtcgatcccctcctgtgtaagctcgaagaagagggctctggtgtacagtatgggtccaagaacatcactactatggcctttgcagacgatcttgtcctgctctctgagtcatgggaaggaatgaagaagaatatcgagattctggaagtgttttgcgaactgacaggcctcaaaacacagggggaaaaatgccatggattcttcatccagcctaccaaagattcctatacgattaacaattgtcccccttggaccgtgaacggtacccctctgaacatgattgaacccggtagttccgagaaatatttgggcctccgaatagacccctggaccgggattagcaaaccagaactgcttcaaaaggttaaaggctggcttcaaaggataaatgacgcagccctgaaaccattccagaaggttgacattctgaagggctacacaataccacgcctgatttatctggctgaccaagcggatgttaaaacaacctatctggagacattggatctggagatacgaaccgcagtcaaagagtggcttcacctccctagctgtacgtgtgatgcaattttgtactcctcaacccgagacggcggcctcgggataaccaggctgaccggactgattcccagcgtgcaggctaggcgactccacagaatcgcacagagtagtgatgagacaacacgagaaattgcgaagaaagaaggcatagaaaaagagtacgccagactctggatcgcagccggcggtaacaaagagaaaattcctcctatctgggaccctactaccgttcgcgtcatctctgaagggcagggcggcgaaaagcaagtgtctgagtgggaactgcctgcaccgaagaccatctttcccaagccttgcgattggcggaatcaggaatttactaattggactaaacttattagtcaaggcaggggcatctctaacttcgagtcagacaagatcagtaattcatggctggagttccaccgaggcattcctcaccgcaaattgctgactgccctgcagctgcgcgcgaacgtttaccctacccgcgagtttcttacccgggggcaacagggaacactgatgagagcttgtcggcattgccaggccgaggctgagacttgcgctcatatcatcggctattgtcctgctgtccaagatgccaggattaagcgacacaaccagatctgcgagatgctgatggaggaggcgaagaaaaaggagtggaccgtgttccaagagcctcatatccacgatgaacataacgagctgtacaagccagatctggtatttgtgaaagagaaccaggccattgtggtcgatgtgacaatacgctacgaaagcaagtcaaccagcatggccgatgccgccgctgagaaggtgagaaagtaccagcatcttactgaccatatccaggatctcacaaaagccagcaatatcaaatttatgggcttccctttgggcgcgagagggaagtggcacccaggaaactacgagctgttgaaagagccggggctctctagctcacggcaggataaggtggcgcgcagactgagtaacagagctttgttctcaagcgttgacatcattcatatttttgcttctaaaactaggacaatcactcggagtgccgatatctaa

SEQ ID NO: 1685 - DNA, 3978 bp, synthetic construct
  source 1..3978: mol_type = other DNA; note = FH-MCP-MG140-149
atggactacaaagacgatgacgacaagtacccctatgatgtacctgattatgctgccagcaatttcacacagttcgtccttgtagacaacggcggcaccggggatgttacagtggccccgagcaatttcgcaaacggcgtagccgagtggatctcctctaatagcagaagccaggcttataaggttacatgctctgtaaggcagtcttccgcacaaaatagaaagtacacaatcaaggtcgaagtgcccaaggttgctacacagaccgttggtggagaggagttgccagtggctgggtggcgctcctacctgaatatggagttaacaatccccattttcgctaccaattcagactgtgaactcattgtcaaagctatgcaaggtcttcttaaggatggtaacccaattccaagtgcaattgctgctaattcaggcatttattctggcggcagcagcggcggctcaagcggaagtgaaacacctggaacttccgaaagcgctacgcctgaatcttctggtggatcttctggcggatcttccgcatgcgtcgaccagactgaacgagcggattcacctagtgggagcgtgaccacaatcagccaggactcccataaccctttctatcttatcgtgtatcccatcgaaagtgattgtaccctgtgtgacttcaactgtggtaacttgaatcttaagataaggcaacacgtgattgacgaacatgcaattaataattttaagtatggatgcaagctctgcttcaaaaattacgagacaattaacggagtgaaagctcattacaccgcttgcaaaaggcagccaattgccactacaacaacaacaacgaccacaaccacttccacggccacaaccactacctctatcagatccacatctcccccatcaacaactgatccattccaatgcgccgagtgtcttaaggcgtctacaattaagatatttaaagacaggaaagggttgactacgcatatgagaaccaagcaccctgaggaatacgagacatctaaaatggtggctaccaaaaggatagcctggagtaacgatgaggacagagtgcttgctaaactggagttgtcccttaaggaggtacagcggggacagatcctgtctcgcctccacgtaggctacaatgagatcgctgcaaagtccaaggctcccagccggtccaaagaggctattaggggcaggaggcagcagcccgactataaagctctgatgaacgagatgattgaagaactggatgccacttccgataatgatgatagctcatctgatgtttccatccctgctcatactgcgatacctgcttctaattgtaacattgtaaacccgcgaactggcatccataagtacctcgaagacattctgaaagatcggagcaaggtgttcaatagcgagactctcgacgctatccagaagtatctgagggacgaggacagtgatgagatcctgacgaagactatgaatggaatcaacgaagccattgagatgtatcgggaaaaacatcccccaaagctcaagtgcgggaagccaaaggtttcaaacaacaagaagccaattcggaacaccaaacgccaggagtctgcccggatgcacggatattaccagagtctgttctataagaacgaaaagaaattggtcaccgagattttggacggtgaatcatcaaatgtagatcctcccccaattgccgtcgctgagacgtattataaaaacatatggtccaaacctagtaaagacgatgccccctttgagctgaaggtaactacgaacactgacgagcttttcgcccccatttccaaggaagagatcgataacgcaatccgcaacaccaagcaggactccgcccccggccccgatctggtcaattggtttgaaacaaagggaatcgtcacagaactgagcgccgttttcaatatctggcttgggatacagcggatccccaaccagttgaaggaaaataagactattctgattccaaagagtaacaccgaccagtccaatatcaagaattggcggcccatcacaatcagctccatgatccttagaacatacaacaaaatcctgggctatcgcatgaaccgagtcttcaagaccaacgacaaacaggtcggctttaaaccagttaacggctgcggcatcaatatcctgtggctccattccttgctgaaacatgctcgaaagaatcggaataacatctacgcctgtcttatcgacgtgtccaaggccttcgattcagtgtcccatgaaagcataaccagggccctgcggcgaaacggggccccaactgcacttatcaatatcatcactgaccaatacacaaacgcaaataccgtgattacgtacaacgatgcacactctcagaaaattaacatcctttgcggggtgaaacaaggtgatcctctgtctagcatcctgttcaaccttataatcgatgaactcttcgatgtgcttcaagacgaccacggttactctatacacggcattggcaagaccaatgcccgctgttttgcggatgatttgtgcctgattagctcaaccagaattggcatgggggagttgcttcgaaagaccaatgtcttcctggcagaacggggtctgagtattaatcctgcgaagtgcatcacaattggattggcaaaaggctataagggtaagaagagcaagatcgagactgaaagcctctttgacattaacgggacccccatacctatgctgggctacaccgataaaacctgcagatacttggggatcaattttacttctatcggggcagtggacagcaaaagaataaagcgcgacattgttgaggcactgcacaagataacaaaaataaagctgaaagcccagtgtaagcttaaactcttgcgcacctacgtcatcccccgctttctctaccaactggtcaacagtgaaatccagcctagctttctgaagcgcatagacatatgcatccggaagaccgtgcggtcaatcctgcacttgccaatgagcctgtctaacgagtttttctacctgccgatgaaggagggcggactccagtttccggacctttctcaagtggtgggaatcgctaaaattaggctgtttaagaaaatcaccctcctcggcgacccaatgctgaagtaccttatcgaggaccaaggaaattgcattaatgagaagtttattgttaacctgaatatcggcgggacacacaccgctaatgaaatcacacatctcaaagatcagatgatgaaggagaaaagagcctcatatgccaaaaaggttcatagcaccggtcaggagatttttgcgacgtgcccgctgacaaatcagtggatccagggcaatcttaaaacaatgagaaccagaacctttataaactcaataaaactgagaacaaattctctcgagactaaagtgacgacgactaggggcctcgacactaataaaacctgccgaatgtgcaacatggcagatgagtcacttatgcacctgttgcaatgttgtcctgcaaccaaaggcctcaggtatgtgcgccaccacaagatatgtgctcgcgtggccaacaaactgatcgccagagggtaccaagtttacaaagagaagtccttcccggatcctaacagattgggatgtacacttaggcccgacatcattgccatcaaggataatcgagtccttattctggacgtgagcgccatttatgaaagaactggggcaactttcattaacgcctaccagaataaaatcacccgatatgacccaattctgaacgcagtcaagaatcacttcgattgtagcgatggacaggtgatcgggttgatcattggatctcgcggttcttattaccacaaccaccttcatatttggcaccagctcggactctctaccatggacctcaagttcattgcgatcggctgcatggaagactccataaaaattgctagtctgagtagtttgattagggatatctaa

SEQ ID NO: 1686 - DNA, 4083 bp, synthetic construct
  source 1..4083: mol_type = other DNA; note = FH-MCP-MG140-152
atggactacaaagacgatgacgacaagtacccctatgatgtacctgattatgctgccagcaatttcacacagttcgtccttgtagacaacggcggcaccggggatgttacagtggccccgagcaatttcgcaaacggcgtagccgagtggatctcctctaatagcagaagccaggcttataaggttacatgctctgtaaggcagtcttccgcacaaaatagaaagtacacaatcaaggtcgaagtgcccaaggttgctacacagaccgttggtggagaggagttgccagtggctgggtggcgctcctacctgaatatggagttaacaatccccattttcgctaccaattcagactgtgaactcattgtcaaagctatgcaaggtcttcttaaggatggtaacccaattccaagtgcaattgctgctaattcaggcatttattctggcggcagcagcggcggctcaagcggaagtgaaacacctggaacttccgaaagcgctacgcctgaatcttctggtggatcttctggcggatcttccgcatgcgtcgacaagacgcgcactaacactagagtcaatgtcacgcggtccgtgcagtcagagtccatcgaaattgataaggatgagccatctcaggagtccgctaggtccccacccgtggtttataggattgactaccccataggtgaggagcgctgtagtatctgcgttgatcgactcccgagtcaaaatctgaagatcagagaacacctctcagacgtacacggcgtgcaagagatttactacaaatgccgaatctgtaccaaggagtacccgaacatctctagtatgaaatctcactatcccgcttgtgtgcggaaactggggcagcagcctaccacaaatccgactgtcgataaccacccccagaatccaactaccggccaacagcacaccacgacctcaaccggccccgtcctgagcatgtttcagtgctctgtctgccaccatctgaaggtgaattatgtcgccaaggaccagaaaggcctcgtgacccatatgcgcaccaagcaccctaatgagtatgaagagagcaagaaagtagccaatattcgggtagcctggcatgaggatgaggataggttgcttgctacactggagatctctctgaaagcaaaacagaagggccagatcctgggaaggctgtgcactgaatggaataagatcgccgttcaatctcacgctaaccctcgatccaaagaggcaatccgaggacgccggcagcagccagaatacaaggctatgctcgaagaggtgcagtgtcgctccaacttgctcctccaggctgccgataggacttccaacgacaatgccagtagcaaggagagcgactctgaaagtcctacagaccccgccgcggtagaggatgatacttgcatgatccataatctgctcagggacattttgcagagcgacaatccaggtgtgtctaccttcatgaaggacgccatcacagccctgcacaaccctcagactgcaattgatcccgtgcaacagacgatgattggcattcagcacagtttgtccatcatcaggaaccgaaactcttgccgaaccagccgaaatttcacatctaatagaaagccagccaggaataagtccaggattattaaagaaaaaagccatgcgtattaccagaagctgtacctgaataataagtctcgcctcattgacgaactcatagaaggggtgcctccccatactgatcctcccccaatccataccgccgtccagcactatgaacagatctggagtactatgggtgtagaccaacaccctgtgcagaagatccccgatcagcgctctataggatccaactttctcagccccattaccagggtcgatatagaatgggccatcaagaggaccaagcgcgatactgctaaggggctggatcaagtgacgttgcaagaagcgaaacttcttgcgaaagaagatctgtatatagctttcaatatttggctctgttgtcagagaatcccaagagaactcaagttgaatagaaccactctgatccccaagggcaacaccgatctggacaacatcaagaattggcgacctataactatttccagtctgctccttcggctgttcaataagattatcggcttccggcttaacaagattttcgaacttgacaagaggcagatgggatttaggcctatcaatggttgttcccttaatatccagtggctgcataacttgctgaaacatgccaggctccaccggcggaacctgtacgtgtgcctgatcgatgtggcgaaagccttcgacagcatcccccacgaaagcatctttagggctttgacacgatttcgggcctcaagttccataatagagttgatacgcgaccagtacacaaactcttcaactaccatagcttacaaagatctgagcagccgccggatccgcatccttagaggggttaagcaaggggatagccttagcccactcctttttaacctggtgatcgacgagctgttcgatatactgaaggatcagttcggatactcaatcgcaaacattggtagcacgaacatcaagtgcttcgcagacgatatgtgtcttatcagcgggtctaagtccggaatgggcgtgctcattaaagacgccactacattccttgagcacaggggactgcaggttaacgcaaaaaaatgcatgtcaattggtctggccaaggcctacaaaggcaaaaagagtaaaatcgtgacagaacccaccttcaacatccatggtgttgagatcccaatgctcgggtacgtggagcacacaactaaatacctgggcattgagtttacctccgtgggctccattaacgcaaacgtcgctaaagcaaaaatcgagtatgttctcgaccagctgcaacagacaccgcttaagcctcagcagaagctggatctgattcgctcttacatcgtgccacgattcatttaccagctgatcaacctggagatctatccgaaaattctgaagcaaatcgatcttttgatccggagatctgtgcggagcattctgcatctgcatcagtgccttagtactgagtttttttacttgcctgtgcgggacggcggactccagattcctttgcttcgggatatagtcggacttgctaaagtgaggatttataaacaggtcatgaagagcgacgacaccctcctgaaacaccttgtcgaggcgcaggggtttttcacgattcaacgattcatccatgaattgcagctgtcatccagtttcgagacaacagacattgtgcagagaaagacacaactggtgagagacaagcgcgtgtcattcggcaacaaagtccatgggcacggatttgaggttttctcaacatgtcccatgaccaacttttggttgtatggagactgcaaaaccatgaccgggaggtcattcatcaacgggataaaacttagaagcaacacgttggaaactaaagtgaccctcagccgagggatggacgtagacaaaacctgccgcctttgcaagaagcaagacgaaagcataatgcacgtgttgcagttctgtcagggtacacaaggcttgcggtacctcagacataattacgtctgcgctagagtggtgaataagcttcgagaaagaggattcacagtctactccgagaaggtatttctggcagatgtgacaggcttggacaccctgaggcccgacatacttgcagtcaaagataaccaggcttatcttctggacgttcagtgtgtgtatgagacctctaacgcctcctttatcaatgcctataatcttaagacagaaatccacaccagtcactctaattctaaaagatcagtttggctctatattgggaataaccctagatctgaccggtggctgacacggtttgttctgtcaccaccaagccgacatctggttcaatttagattttatataattaggacaaaaatttcatccctcaagctgagtcgcgagtttgcaccaaataacgtcaacatttcccggaagtgtgagaaacctactgaaaagcgcgtaggaatcattaagggcaagagaagagatatctaa

SEQ ID NO: 1687 - DNA, 4248 bp, synthetic construct
  source 1..4248: mol_type = other DNA; note = FH-MCP-MG140-154
atggactacaaagacgatgacgacaagtacccctatgatgtacctgattatgctgccagcaatttcacacagttcgtccttgtagacaacggcggcaccggggatgttacagtggccccgagcaatttcgcaaacggcgtagccgagtggatctcctctaatagcagaagccaggcttataaggttacatgctctgtaaggcagtcttccgcacaaaatagaaagtacacaatcaaggtcgaagtgcccaaggttgctacacagaccgttggtggagaggagttgccagtggctgggtggcgctcctacctgaatatggagttaacaatccccattttcgctaccaattcagactgtgaactcattgtcaaagctatgcaaggtcttcttaaggatggtaacccaattccaagtgcaattgctgctaattcaggcatttattctggcggcagcagcggcggctcaagcggaagtgaaacacctggaacttccgaaagcgctacgcctgaatcttctggtggatcttctggcggatcttccgcatgcgtcgacgaacgatccattaggaaaaatgaaacactgcctcgagtgtctcgacagtctaacgcacggcccacatgtactagcgatgccaaggctcgaggtcctcagccaccaagccggcccgagggagacgggctgaaatgtctgaatcctggttgtccctttgtttcaaagaccgtggattccttcgcgcgacaccgctgcaagtttatccccgtagctgagaaggagcctgtgggaacttccgtggtgggcgtggaggagcggccagcctctagtgggaaaccgcccccagcaggcaagcgggccagcagggtctgcccagttgttcggcggaccgtagtgagcaggggcgaacgcaaggcaaaacctgtccccgttatcgaggaggagccgctgtccacacccacaactgagaccgaagaacccacggcctcctcttgggaagacctgcctgccgacgatgaggcgtacgggtgccccgaaaacaactgttcttatgagtgcgcttctgtgtccgagctgagtaaacacagagagacccacgcttcagcatcacaagggaagaaagagacaactcatcctaataagggtgaggcagatgatcccggcaaaccgcccaccaaacaagtgcataactgccagtactgtgttaaaagtttcggcacaaagggaggattgactattcacaagcggaaaacacacccagacgaacacaatagagaaaatcagcagcgcaaggagaacgagtccacgggccgccacagctgggacgagtcaaagcacttggtgatggcaaacctggaactctcctacggtgagctggtgagaacaggaacgttgaatagttctaccatgggggttaatatgttcttgcaactcagcgaaccattcaaggtcggcttttccattaaccagatctcaatgcaaagaaaaggcaagaagtaccaggacgtgctgagagaccggagatgcgaattggctcaaatcgctcgcttgcagtatgaaaccccaattgaagaccagatcaatgtggaggaggaggaacctagtctgccggaatttgaggccgagcccgaggattctaaatttgagggcaaaacacttgatgccgcttatgctgccttgaagcagggcgacgtggaaactgcatccgaccttgctagtaaagttgtgaaacacttgcaggacctgtctacagatactaaaccaaaacctccctccaggtcccggcccgacaagcaggccaaaatcccaaaaaagactaacaagagggccttgaggaagcagcaatatgccaccacccaaaaattgtggcacaaaaaccgggcctcttgtgtgaagaaggtgctgtccggaaggtggacccagccagagcctcaaccggctcacactccagaacagctgcatgacacatggtctgggatatttggaaagccaagccctaagtacaccggcaaggcgccaccaagagctaagataacaaagacagtgggtaacccctttaccgtgacagaatgttctcgaatcttgaaggaagccactgacagcgcggtcggacctgatggagtgaagctccctcttattcgcgaagccgggcctactttcatggctaaactcatgaacattttcctgttcacgggcaaggtgccgtcctcacttaaggtcgctcggacaatcttgatccccaagtctgagaagccgtcagacgccggagactatcgcccaatttccatctcatctcatatataccgggtatacaccagcgcgctcggcaaacgactgtctaaggacgccggactcaaccagaggcagagagggtttattgccgaggatggttgtcgcgataacttgatcctcctcgagaccatcattgccgccagtaaagaatcttgctccgggctcaacatggccttcgtggacatgaaaaaagctttcgatagcgtgtctcacagcgctatcgccgagtctctggactggttcggagtacctaagcaccttgccgatgccataaaggacctctacgtagattgcaccacaagtgtcggtcatggggagatcaaagttacccgcggcgtcaagcagggggaccctctttcttccattctgttcaatatgtgcctcgaaatggctctcagtaatattgaccccaaaatggggatcagattcaagggtcaccatatcttctacctggcctttgccgatgatctggtcattctgtctccgtcagccatgggcctgcagagcttgctggatgatcttgtgcgacattgcggggatgtcgggcttgaacctaaccctaaaaagtgctccagtcttagcatcgttcccgacgggcgcaataaggtagtttttgttgacgatcggagagtctttcacctcagcggagcacccatgggaattatgggtgcgaagagcacatacaagtatctcgggatcgatgtgggattcagaccagacaagcgcgttattcccctctgggataagttcaatagcaaactgaacagtctgacacgcgctcctcttaaaccccagcagcgcatgttggtggtgaggcagtatttgatacctcagatgactcacgtgctcgtattttctgacgcatccaaaaagctgctgaatcggatggatgttaagctccgcctcaatattcgaaagtggctgggcctcccaaacgacacccataaaagcatgttcgcagcctccccagaggccggcggcctcggcatacccagtctcacgcagacaattcccctgctcagactgcgaaggttggctaaactgggcgagagcggagacgtcattctgagagaagtggctagtaataaaaggatccaacagaggctgactgtagcgcgcaaacactgtaaggtcgagggtctcccctattgcactaaggaagagctgaaggccagactgagcgaatcactctgggcctcagcggacggaaggggcctgagaaatgagcaaatgtataaacggggcctctcttttattagagacggcgcatttatgactgggaaagcttacgtgagcgccgtagcagtgcgaggcaacctgttgcaaacccctgccagattggccagggggcggctcaaccgccctggcgcgggtatgtgtcataagtgccatgagggatcagtagcaaccttggggcacatcttgcagagctgtccaaagacccacggattgatggtgcagaggcatgacagtgtcgtgaccagcctcgtcgaagcaatcaggcagacaactcgaaataaaagggtttttgtggaacccagaattaagagggtgggggacactgactacgtgaaaccagatataatcgtcgttaatgagtcacagacataccttatagatgtccagattctggcagatgctggttgtgtcgaggatctgaacagtaaagctgaaataaagaccagcaaatatgacgtcaggccagtacatctgggcgtggatgcatttcttaagacgcatagccttgaagtcgtgtcaccgacgaaggttcacgcattcaccctggactggcggggtaaggtccccgagcataccgagtccgtggcacgggaactcggcgtcctgaaagctctggagtggatcgtgcctgatatgctgcttgcaaatcgctcaatctatactacctggaacaaatctacctcccgacagggcagattcggaaagaagatcgggacggatatctaa

SEQ ID NO: 1688 - DNA, 4500 bp, synthetic construct
  source 1..4500: mol_type = other DNA; note = FH-MCP-MG140-155
atggactacaaagacgatgacgacaagtacccctatgatgtacctgattatgctgccagcaatttcacacagttcgtccttgtagacaacggcggcaccggggatgttacagtggccccgagcaatttcgcaaacggcgtagccgagtggatctcctctaatagcagaagccaggcttataaggttacatgctctgtaaggcagtcttccgcacaaaatagaaagtacacaatcaaggtcgaagtgcccaaggttgctacacagaccgttggtggagaggagttgccagtggctgggtggcgctcctacctgaatatggagttaacaatccccattttcgctaccaattcagactgtgaactcattgtcaaagctatgcaaggtcttcttaaggatggtaacccaattccaagtgcaattgctgctaattcaggcatttattctggcggcagcagcggcggctcaagcggaagtgaaacacctggaacttccgaaagcgctacgcctgaatcttctggtggatcttctggcggatcttccgcatgcgtcgacagagacgacgaagtggtgctgtacctccccactggggctgatcttgtgtgtagggtgggacgctgtggcctgaccttcttgactcctgtaagcttttacgaccacgtgactagggcacatcggcagacacaccgctgtagagtcatctgtagtaactgcggtcgaacatgtaagtctgccgttggccacgcgatccactgggggtatggatgcaaaggaagagccccatcaaagtcagggaccaaagcttttcagtgcagcgagtgtatatgtacgttcacatctgagagagcacgcagcacacacatacgccatgaacacccagtgctctgtaatgagctgcggagattcaagaacgggctcccacttactgaaggggtggatgccgccgacattgtccagtccgttcccgaccaaggctttctgcacctcgacgagatccttaagaacgtcccactggcatccgaggctgatagaggggagctcactcaggagggtattctgcgcatggtgtcactcgaggcaagtggagctctgggaggcgtagccaagatgcgcctcaccggacacattgccacacagtgcggactggaaccctcaaagccaatcctcgacggaatccgaacattgcgcaatactagaaaatggaagagggctttggccaccgttcgggaacaactgggtaagagagctgaggaaacttctactcctaatctgggcagggagtgcagcagtccggatgatgatccaggactggcattggcacaggaggccgaatggcttacagatctccagatcgatccctctcgggttgtgacctgtaactcctccgccttgggcgtagaaattctgccaccctcctacggggactgcatggcaaagtcccaacccggcgctgagataaccacttgccgaattgaccccgcaggacaagaacctgtcgctcccagtgggaccgccgtgaagccccggggcaggaattggcagccttgcgtccttaagccaccaagcgagtacctcgagatcaggagggagattgaaacgcctaccgccgaggagaaaaaatcttctttgttcgttgagccgcccctgaccctggtccacacttacacccctgcgctgggacctgcggagcggcacatcgtgcgacatcggcatagacgcaaagaaagggagaaggaagagggccaatgcgtatatgaaagacgcgagttttatggcgatcccatgctggaatccctggctgatggagacatgggtccggagctcgtcgatggcgtgctcgatggctggcttcgagacattgggaactgcagtaacaccatagcatcaaaggacaacagaggggataataggggagggcgcagaactgccgaaccaaaaagggtaaacagtaagaggttcaaggcaaaacagcgcaagaagttgtccaaaagggctgcagctcggctggccagacagcgggcgtacttgcttcaccgcggcctgtacagagacaatcggaggaaactggcgaggcttctgctggacggggccgaagacgtaggctgtgatattgaagtgggggaggttgagagggagtatcggcggataatgagcatcaaaggctccagctgtggtgtgaagggcagcgtcgaaaactaccctgagccagaggtcagggctaaaaactccggactgatggtccaggttcgggccgaggaagtgcagagacacctgaaacaggttaaacggggctctgcccctggcccggatgctgtgaaggcggaaagtctgaaggcttgggctggtgattgtagccgattggccgccttgttctccgcctggcttcatagtggacgagtgagtccgtctttgaaaaagagccggtccatcttgctcccgaaaacaaatgacagacagcagctgaagtctcttagccgatggcgaccccttaccattggttgccatatactgagattgttcaaccgcattctggcctcccgcctttctgaagccgtcagcatccacgtccgacagaggggttttctgaaagccgtgaatggctgcgctgaaaaccttaccctgctgacagagctcctggatggcgcacgccgcgcggacgctggtagccagcttgctgtgctctttgtggatttcagcaaggctttcgatacaattaagcatgactatctgtgggcttcactgagacgccttggtgtcgggtctccattcgtggaactcatccaaaatatgtacgatggttccatgaccagcttcaaaacgcgaaggggcactacaaaccctatttcaatcatgcggggagttaaacaggggtgtcccctttctcccctgctgtttagcatcgctgtagatcccctgatcacccagttggagcagctctcattgggtaaacgcgtgcccggtggagggaccgtgtcttgtctctcatttgccgacgacacggccctcgtgtccgatgaccccgacaaaatacagaccatgctggattgtatcagtcgatttggagaactcagtggcctcgagctgaaccctcttaagtgcgagggtttcgtgatccagagtctgggtggcaaggctggatctacactcaatcagaatattatttggagagggaagggcaaaaccgtgcctatcttgaggccagactcaaccctgcggtatctcggcgggactatcagcgcatggtgctctccacgcacggatggtcagaatatcagtcaatgcgagaaatatgcagaatgcgtggatagagcctcactgaagcctaccgagaaggtgcagctgtggcgcgaatgtgtcttgcctagattcctgtacgatttgcagttcaaaaacccgacaaaaagctacctgtctaaactcgacgaaatttcttgcaagatggtgaagaggtggttgcgcttgcctaattgcgccactaatcactttctttggtctgccagaagacatggcgggctggggttgcccaagatgcaggccgccggggcaatcacccggattaggactctgatggccgcaaccctctccaaggacccagtgctcgtcgccttggctcgaagcttggactacgggtccctggcacgagacctgtcacggaaattcaatttgcccgccccaaagcctgggaagccttataagcgaatccaatgggtacttgacgagcacgagaagtgggccagcaaaaggtgtcagggatcaggcgcgatgtcctttaaaagctctctgagcaattcatggaacgcctcctgggatcaaaaccgagacagcggattcgccccagggcagatcattgccgcacaactgctgcgggtcaacctttttccttgtggcgaggtcctggcccggggatcaggcagagagattccaagatgtcgctggtgcagagggagagataccttgggccacatttccggcgaatgtcctggcacccgagctcgaaggatcaggaggcataacaaaatacttgaacaggtctgcgcgtttatggttggaaggggctggctggtggagagagaaccctccatctggcacggcgggcgattgtggcggcccgacgtgatcgctcgacttgataagcgaattgttgtgtgcgacataacgtgccgctgggaacgagtttcaaacacattcaattctctcgaggagggaaatcttgagaaaattaaaaagtatagggttcttcgatctacactggagaagcgatacggcacgaaggacatccatttttgcggttatacagtgggagcacggggaggttgggtcaagtcctccgaggtactccttcggcatactgacgcaagtgagacagcgattgggggcttcatcagtcggacatgcagcactgcccttaggcaaacaataaaggtttttgggagtcatagcgaccggttcgaaccagtgggaggcggatttgacgaagatcgcctggacaccaacgatatctaa

SEQ ID NO: 1689 - DNA, 3792 bp, synthetic construct
  source 1..3792: mol_type = other DNA; note = FH-MCP-MG140-156
atggactacaaagacgatgacgacaagtacccctatgatgtacctgattatgctgccagcaatttcacacagttcgtccttgtagacaacggcggcaccggggatgttacagtggccccgagcaatttcgcaaacggcgtagccgagtggatctcctctaatagcagaagccaggcttataaggttacatgctctgtaaggcagtcttccgcacaaaatagaaagtacacaatcaaggtcgaagtgcccaaggttgctacacagaccgttggtggagaggagttgccagtggctgggtggcgctcctacctgaatatggagttaacaatccccattttcgctaccaattcagactgtgaactcattgtcaaagctatgcaaggtcttcttaaggatggtaacccaattccaagtgcaattgctgctaattcaggcatttattctggcggcagcagcggcggctcaagcggaagtgaaacacctggaacttccgaaagcgctacgcctgaatcttctggtggatcttctggcggatcttccgcatgcgtcgacaacattcctacaacacagaacggcgactcaagcagtgccccggagcgggtaacttgtggctgtgggcgggacttcgcaacccagagggggttggcaatacaccaacggaagtgtttgactacccgaggggtgtccaccagctctatcaagtgtgacctctgcgatgtggagttctcatccgcagagggtgtatcacaacacatgagagcgcgccatcctgctgaatacaatgctagaaacgccgctggcacagcccacaagaaccagagatggagcacactcgaggttgagagaatggcccaccttgaggcaagatggggacgcgagatgggtcccataaacaagtacctggagcatcagatgaatggccgccctctggagtctttgaagaaaaagcgacagtgcgctgattaccgctctctggtggcaaggtacagaagtgagctcgaagaagcagcggacgatgacgaggtgttcctgccctccgatgtccaggtgtgtgttgtgccaccctctcccccacaaaatacaggggagattgaatatccatctattctcgggaccccagtgccacctcgaagcgccccgcccgtcatgtccagcctggagcaacgggatgcaacactccctgatcagtttgtggaagcctgcggcacttaccacgagagggagctcctggaaattttgttcgggagtcgggcggacggagtgaaggccattgacctcatggtcgccgagatcatctccccacatcgcgcaagaggatctggcgaacagaacgcatctgatggtgcagcgggctcacctaagcctaccgccaggaccaaaaggtctgagaagcgaaatagtcgcgcccggcgctataggctggcccaacatatgtacacccacgaccgcgctcggttggcgagatctattctggacgacgtgcctctggtgtgcgacgggaccccaagtgctgaagcgattgagaacacatacgcacctatcttggaatctgccagctccggagtgcatttggaacccaccagcgacaagacaaattctactaaaatatctagcgagcaattgatagaactgaacggccccatatctaacctcgagataatcaatgccttctctctgctcaaatccaaagccaacggtcctgacggggtctcatgccgaaggtttgaaacctgggacaccggaaaaagactgctttgctttaacctcatgttttactggggttatattcctagagagcttaaggagtgcagaaccagacttatccccaagcagaacattagattggacgatataaacaactggcgaccaattacaatgggtagtgtgctgctgaaaacattctctaagttgcttctgaagcggctgtccattgtgcccattcaccaggcccaaaaagggtttaccaccgacgacggcgttgtttttaacaatgccctgctggacagcatcatacggaccaggcgggctgcaagtaggccctataccatcattagtctggatctcagaagggctttcgacaccgtcgaacatgctgcgatagctagagccctgcactcaagggggatcaacggaagattccccaacttcataatggagtcctaccgggactgcactacgtccatcacttgcggaaatcaaacgagtaggcgatttgcagtgaggcgcggtgtcaagcagggagatccactttccactggactgttcaatcttgtaatcgaccagtttatcagctcactgcctgttgattgtggcatctgtatcgagaatgagtacatccctgtactggcttatgcagatgatattctgcttttggccccgactaggcgggaggcacggcttcttctcgagagggcccacgattttttcaagaaccagggaatggatctcaacacaaagaagtgtgcctctttgatcgtcgaaactgtaccacgcgctaagaaacttgtcgccagacctgaagagtactttacagtgaatggacagtcaatcaagcctgtaactacagaccatttcaagtacctgggcacccactacagttgcttcggcacagctaaaccaacgaacgccttgtttcagttggaggcacagcgcctgctcaaaagcccattgaaaccagcccagaagctgtatatcgctactaaacacctgtttccgagagtccttgcccgactgcagcaccttcgggtgtccaagacgatcttgggaagagcaaattttattgcccgagctctggtgaagtcaattctccatcttcccaaaaccactgctaatgcttatttgcacgccgcccgcaaagatggtgggctgggcattcccgattttatcgcaattatccccagtattatgtataaacgactgggaacgtgtcttgaaagcgccaggggcagacccttcgcggaagtcagcttccgaaaagctcaggataaattccttacaatcgctggcgggattattaccagcaaagacactagaaatcgccaaaccgccgagatcttggaaaaaagctatagcgggaacggcatacatcaggtcggcaatgttaagagaggctcctcctggatcgaaacacccccgtccaactggacaggaagtacttatatcaaagcgattcaactcagaggaaatctgctgccgactcgggggattccaagcaatccacccggcgagcggaagtgccgcggtggatgtaaaagagatgagagcctctctcatgtggtgcagggctgttttgtaacccacgagccacgcatcgctcggcataatcatacattttcattgctgtcaaagttcgccaggaagagcgggtgggctgccgtgcacgaacccacagtgtatctgagcgatgaatccaccaggaagccggacctgatcctcgttaacagccagtatgccatcgtgtgtgacgtcgggatctactgggaaggcgaacgggatctggagaccagtttcgctgataagctcaagaaatacaatactgaaccaatgatacagtatatgcagagaaggttccctgaccgcactgtggtcgttcaccctttcatcgttggggcccggggtacgttggccaagtcaaataataggctgattgacctgctctccatttcccaggcagatcaggctaaacttatccacgatgttatcgtgggctctatcgcctgccactcagctttttccaaacgcgtgtggtgccgaaggcagttcggttacgcagacgccacgcatgatatctaa

SEQ ID NO: 1690 - DNA, 4155 bp, synthetic construct
  source 1..4155: mol_type = other DNA; note = FH-MCP-MG140-157
atggactacaaagacgatgacgacaagtacccctatgatgtacctgattatgctgccagcaatttcacacagttcgtccttgtagacaacggcggcaccggggatgttacagtggccccgagcaatttcgcaaacggcgtagccgagtggatctcctctaatagcagaagccaggcttataaggttacatgctctgtaaggcagtcttccgcacaaaatagaaagtacacaatcaaggtcgaagtgcccaaggttgctacacagaccgttggtggagaggagttgccagtggctgggtggcgctcctacctgaatatggagttaacaatccccattttcgctaccaattcagactgtgaactcattgtcaaagctatgcaaggtcttcttaaggatggtaacccaattccaagtgcaattgctgctaattcaggcatttattctggcggcagcagcggcggctcaagcggaagtgaaacacctggaacttccgaaagcgctacgcctgaatcttctggtggatcttctggcggatcttccgcatgcgtcgactcccaggtaaataatgccgatgaccggcaggaaagcggagccaagcggaccagagctagtggtaccagcgagcgagaggacgcgcacgacgcatactgtgtgttctatcctttcgacatgaacggcgcttgctctaggtgttcaggctcattgggatcttccatggcgtccatagaggagcatctgaagagccacgacattacaaaattggattatcagtgtggcgtgtgtcacaagtcatggccctcctggagatctgcgatagcccattataacaggagcaattgcagacatacaacgccttcaatctccacaaccaccgcaagtacgctgactacgacggacgagatggaaactgaagagacagtgaaacggaccactacagacacagtcgctaccatcgccgagagcacccagcaacaacagcaagagggacagccggccctcttttactgcagcctgtgcgcttctgggggctggtctaaggccgtaagcctctctcaacacatgcggcacatgcacgctgaggcatacaatgcaaccatcgaggttgccacaaccaagaggcggtggaccaaggacgaggttgaagtgctggccgaacttgaggctagtatcccaattgaagacggagcctacattaaccagatcttggcccagcggttccctagccggacgtatgaagctattaaaagccatcgaaaacgggctgactaccgcgatcttgtggaaagattgcgacacagaggcattaccacgaggcgcagtgagggcacaacccataccggaactgacagtgcatcaatgacttccagcactaacaataataacaacttctccccgaatgctatcgtgaacgacgggaattgtttcgcagatcccggtatcgatgcctcatccgtgcctaacgactatccaaacactggaatccctatggtggtcaacgatgaagagcaatacccagacattcgcgcttacgtgctgcaacacataatggatgggcgagttcagttgtgtgagcgcatgaggatcgccgttgacaggtttatgacacatacaagccagacagtagcttctgcagtagacatgtcactggagggtattcatcaagcccttgagcgggtgcccgcatccgatgaagcatcaaacaggaagaaaaattctgtcggcaagcccaaatccaccaagacgaagaagaagatgaatcggttcgcccattaccagcagctgttcaaaaagaacaagagtaaacttgcgtcagaaatctttgattccgtggacactagtgctagtaaaccacctatcagcgatgcctataagcactttcagaaaatttgggaggtggaagcatcagataccgccgccgtggaagacacagccacccggggaagccagattttgctggctcccattacacgcgaagaaataacccgagtgatcggtcagactaagcacgacacagccgtggggcctgatgagctcaccctgggtagaatcagatgcatcgcgggcagggagctttggtgcgcttttaacatttggatcggcatgaggcaaatacccaatcttcttaaattgaataggactgcactgttgcccaaaggtagtgagggactggatcaaattaagaattggcggcctattactatcgccagtttgttgatcagattgtataacaaaatactcgctaagaggatgcagcttgttttcgagaccgataggaagcagacaggatttaagccgatgaacggggtgggacaaaatacagccctcctgcacaatattcttaggcacgccaggactaataaaaataacctgttcgtctgtctgttggacgtctccaaagcctttgattctgtcccacatgactccatcaaacgagcgctgcgcaaggtggggtgtccaaaggagatgatagaactcatcggggaacagtataccgatatttctactactatcgcatacggtacagactctagcccgaccattaaaatcaatcgaggtgtgaaacaaggcgacccaatgagcagtattttgtttaaccttgtcattgacgagctgtttgagatcatcggggatagattcggctatgagattcctggggtcggctctgttaatgccagagcgttcgctgatgatatagccctgatgtcaagctccgagataggaatgcagcagctcctgtcactcaccgagaaattcctctccgacagaggactggaactgaacgtcaagaagtgtattgcaatatgcctgcgcaaagcaggaaaagtaaaaaaaagccaggtcgcagatgcatctgtcaagaatccccctattttcaaggtgaaagatgagcccatccggctgctgggggtcaaggagcagtgtaagtatctcgggatccactacacaccacttggcgcagtggacccacgagaatcagtgtccaagctgcgattggccctcactagcctgagcaaagctccacttaagcctcagcaaaaggtcgtaatgctgagaactcatcttattccacgattcctccattctttcacctacacagagtgttatcctaagctgctcgggcagcaggatcgcctgatccggcgctggttgaaaacaaccctgaaactccccgcctctctttcaagcgactttttctacttgcccaccaaggagggcggtctcggcatcggcaaaatttacgatctggtgggcttcgctaagatcaggctctactccatgtttgctcgatccggggatgtttgcttgcagtacttggtggagactcaggggagttccatgcacgctcggtggtgccaggccatgaaggtttcctaccgcccacctgtggctgaacttaacaagagaaagatcgtgatccgagacgaaggacgagaccggttcatacagactgtgcatggcagcgcgcatgaggtgttccagagttctccgatcactaatcagtggctcagtggccagaccagaattatgcgcggatcaactttcatccgcagcatccagatgagaaccaataccactcccacccgggtgagcacgactcggggtaggaacagtataaagatctgccgccgatgcggccttgccgatgaaacactgatccacatcctgcaaacgtgcccaattacacagggaatgcgctgccagagacacaacaacgtttgccgaagggtcgcggacaaactgagaagcaaggggtttcaggtgttttctgaacagggcattccctcacccggactccaaacaaacatcagtaggcctgatctcatagccactagaggtgaccaggccctggtgctcgatgttacatgcgtctttgaaacagggaagcattcccttaccgaagcatatcgccgcaaggtgactcgatatgaaagcctggtcgagaccatcaaggaaaaatactctgttacgacagtagagtttcacggcctttgtatcggctctaggggcgctattgagccccgacacctgtccatttggcactccattggattttctgggaccgaactgggggttctggcagtgtctgtcatggaggacagccttcgcaccataaccctgtttaacaatgccaacaaaattagagtagatatctaa

SEQ ID NO: 1691 - DNA, 3759 bp, synthetic construct
  source 1..3759: mol_type = other DNA; note = FH-MCP-MG140-158
atggactacaaagacgatgacgacaagtacccctatgatgtacctgattatgctgccagcaatttcacacagttcgtccttgtagacaacggcggcaccggggatgttacagtggccccgagcaatttcgcaaacggcgtagccgagtggatctcctctaatagcagaagccaggcttataaggttacatgctctgtaaggcagtcttccgcacaaaatagaaagtacacaatcaaggtcgaagtgcccaaggttgctacacagaccgttggtggagaggagttgccagtggctgggtggcgctcctacctgaatatggagttaacaatccccattttcgctaccaattcagactgtgaactcattgtcaaagctatgcaaggtcttcttaaggatggtaacccaattccaagtgcaattgctgctaattcaggcatttattctggcggcagcagcggcggctcaagcggaagtgaaacacctggaacttccgaaagcgctacgcctgaatcttctggtggatcttctggcggatcttccgcatgcgtcgactatgaggaaattatgctgcgggggcctgccacggcggggccagttattttcgctgagggggccgcgggtgtggagcctcagatggtgatctgcgaactgtgcactcggtctttccagggtcaaaggggattgcatgtgcatcagagacgggcccatccaccagaatatcacgcacaacatcaagtcctgcctagagtaaaggccagatggatcagcgaggagtcacggcgcatggcggagcaggaagcgctgctgcggctctcaggagtacagcccagagacattaataagcgcctgacagaaaaattccctaaccggagctacgagtccatgaagggcgagcgaaagaaggacagttaccagaagttggtctctgagctcgttctgatggcccccgttcccgaatcagaaattccaactcagactcccaccgggccgcaggtggaggaccccgtccccatggacagaagcttgtggaaggtcgaggtcctggcttgcataaaggatctgatagagaagcgaggctctccggaggaagagcctctgtgggattctctgacaagtgcattcgtctctctctccgggggaactgtagatctctcagatgtgaaagtttgcttggaccttcacgctaaacgcttgactgaccttctggggcctaagcggaagcggagaagaccccctcgaaaggtgccacgaaaacgcacccggcgcttcgccaagacgggggatgaggctaacaatagctctgcggccgacggcgccgccgccaccgcagccccctctaaacgaacccgctcccagaggaagcctaatcctgctcggatcgctcgatctcaggcctatggtcgagtgcaggcagcctttagaaagaaccgaaaacggtgcgcagatatgatcctggaaggcaaatgggaggaagaggctacgactctgaggctcgaggagcaagaggcattctggaggcctctctttgaagagccaagtatgcccgatgaccggcccgtcctgaaaattcctgagaattggcagatagtggatccaatctcaatcggggaggtggtgaaagctctcgcggactcagaggagtcagcccccggatctgacgagatcactctcgtgagtctccgatctgtgtctccctccatgctcgccgcgagctacaatttgtggcttctggcgggcttctgcccagatagatttgtcatcggcgaaacgattctgattcccaaagacggcgacctgaaaaaccccgcgaactatagacccattacagttgcttctcgcgtgactagggtgtttcacaagatcatcgcagctcgcctgactaactccgtacctttggacccccgccagaaggcattccggccggttgacggctgtgcagacaacgtctatctcttggactccctccttaaggatgcccagagacgacgacggccattgaatcttgcctttcttgacgtggccaaggcttttgactccgtgagccactacacacttgctagatgcttgcggcgccagggtgtcccggaacctctggtggagtatgtctgtggaaccctggctaactcctccaccgtgctgaaggtccagggccgcaaatctacaccaatagtgtgcggcaggggcgtgcgccagggtgatcctctcagcgcaatactgtttaacctggttattgacgaggtcatcgctgggctttccaaaagcatcggattcgaacttagcgaaaatctggtggtaagatgtctggctttcgcagacgatctggtcctggttgctaccagtgccgacgggcttagggaccaaatgttccacgtgatcgagggtctgcgaaacgggggaatgcttattaatcccgacaagtgcgcatccctgcggattgatgttgatggacgagcaaagagatgggtagttaacccaagcccttttctcgtcttgcaggacaaacagatcaaagctttggacattgtgggcacatacaagtatctgggactccaggcaggagcgaaaggcttgagaaaggcctacggaagcttcctccaagagaagcttgattggctgtcacgagccccactcaaaccacaacagaggatgtacatactgcgctgtcacctgttgcctagaatgtaccacggcctggtgcttggcgagaccaactctactgctcttgaccagtacgatcggatggtgcgcagaacaatcagaaaatggcttcgattgccacatgataccgtggcagcctattaccacgcaaaagtggtagacgggggcctggaaatccctagattgcggtacagcatcccggtgatgaaaaacaggaggatggccaaacttgaaagctcccttgacccggtgatgcagtgggtggccaacagtccatgttttcttggcgccaaggttcgcagctcaaaagccgcaaaggttgtgggtcaaacactcgacacaggcagggatgtgcagcggctgctcgctaatcagctgcacaccaccgctgatggaaggggccttagacaccagcggcagtctcctcatgtgaacaattgggttcgagacgggtccaatttgctgtccggaggcgattacttggaggccgtgctcgttcgcggtaatctgttccagactcccgaaagggccaccaggggtagacgcaccgtcccacctatgtgtgacgccggctgcaacagcacctgtacactggcacacatgagtcaatcctgtatgcgcacccacaggctgcgctgtgaacggcataacagcgtactcgaatttattgtgaatagagctatcgccatgcgccataacgtcgtccgggagccagtagtcccgacaagggctggtcgaaggaagccagatcttgtggccgaagttgatgggagcgtgctcgtcgtagatgtaaccattgtgtccgatcaatgtaatcttaatacccccttcaaggctaaggtggattattattccacagacgatgtgaaggcctgggtggccgcttcttaccccgggaaacccgtggaatttggggccgtcgtcttcaattggaggggagcactgaacctgaaaagtagcgttctgttgagaaggcttggagtgtcagcccgggatgaaacacttctgagttgcagggttctcacgtttacagcaaatatgttcaaagcctttacccgaagtactgtcaggaaggaatgcaggagttcaagggatatctaa

SEQ ID NO: 1692 - DNA, 4284 bp, synthetic construct
  source 1..4284: mol_type = other DNA; note = FH-MCP-MG176-2
atggactacaaagacgatgacgacaagtacccctatgatgtacctgattatgctgccagcaatttcacacagttcgtccttgtagacaacggcggcaccggggatgttacagtggccccgagcaatttcgcaaacggcgtagccgagtggatctcctctaatagcagaagccaggcttataaggttacatgctctgtaaggcagtcttccgcacaaaatagaaagtacacaatcaaggtcgaagtgcccaaggttgctacacagaccgttggtggagaggagttgccagtggctgggtggcgctcctacctgaatatggagttaacaatccccattttcgctaccaattcagactgtgaactcattgtcaaagctatgcaaggtcttcttaaggatggtaacccaattccaagtgcaattgctgctaattcaggcatttattctggcggcagcagcggcggctcaagcggaagtgaaacacctggaacttccgaaagcgctacgcctgaatcttctggtggatcttctggcggatcttccgcatgcgtcgacgccaatagacctgcggtccggacaacatctccctgctcaaccgaggagttgaatgctggaatacatgcagccgcgccacccaaaagagtgcggcaaagcgacgacgccacatgtagtcaagaagggctggatgctgatgtgaacctcgtgcatcagggcagatctgatctctggaaagactccgaagccgaagagctgcgggagctggtgggactcaacaccaactctaaggggctgatcagttgggtaagggtgcttgaggcttggaagagtaagggcctttgcgagagaaccaaagggagtctgatggctaaatggcaaggactgaaaaacaaggctgctcgcgagttggttttggatgacactaatgttgcacaacgcggtactggtaaaagttcacccgtcagaggaacccttgatagctcagttagcgtagtgctcgatacccgcacgccaaacacagttgtgcaggcagtgaacaagggaaatggaaatacacggcctcaggaccattgtgacgacactgcagccgcccccatcgatccaaagcttaaagaggatataaggaccgtttttaaagaaaaactgaaactctccaagcgccttggctgtaagccgaacctgcgaaagtctcctgcccgcgtgaccggcaaagtgtctcggtcacttatctctgaagtagataacctgattgacggggagcttggatctaagactgggcgcaagctcagttggcgctggctctccatcgtcgtatatgccgccgctctgacagtctcagagatcgaggggaggcagcggatcgagcgcagtcagaagactaaagaatggtttaaaaactcttataaggaggtcgaacggctcagaagcattatcgggaaaagcaccgctgaattgaatcggcggtccagcggtatcgaccctacatctaaacagaatagcaatatagcaatgctccgcaaacgatacggcgtcgaaacattcgccgacataacctctctggtcggtaaactgaaggagcggcttaagttgttgaggtcacgaatcgcccttaggaaagaagaccaacgacggcagagagtccggattactcccgcaaaggttctgttccgaagtaaatccgatccaagcggcgggggcgacaaactcaatattgaagatgtccgaaagtattggaaaggaattgtgggccgggccaagagctttgattgcaggaacgaggacctggtggcttggagtgctacgcttgagggcgtcaagacggaggaggatttcggagactccctttcccaagatctgtggggcgaggcaaccaagaaagcacggagttggaaagcacatggcccggacgggctgcagggatattggtggaaagcgttcagaagcgccaacgccgcattgtaccacctggccagacgccatctgacgtcaggcgacgccctccctgagaaatggatcagcgaaggcagaataattttgctttataagagcggctccaaggaagatccctccaactacagacccattgcctgtctgaacacctgctacaagctgctgacgtcctatatcacactgttcgtggacagacacgtccgatctaataatattctccctcgagagcaggttgcccttcagaaaaggtcttgggggtgtactcatgcgttgatgctggaccagactctcgtttcagacgctcagtaccagaagcagaggccaatttccctggcctggattgactacgccaaggcctttgacagcgtgccccatgcctacatcaaatggctgctgaaggtggtaaagttgcctaagactctcaggacttttgtgaaccgcttgctcgggtcttggcaggtgaagtacgaggcacgggatagtagcggtcggacacacagatctaacatcctcgaaatcaagtcaggcgtgctgcagggcgacagcttcagcccactgctgttctgcttggcgatggccccaattagtcacgcactgaatagtaccctgattgggtatcaaacagctaccggcaagacccagaggcttcagttgaagctgtcccacttgttctacatggacgacctgaagctttatgccgactcctccgaaaatctgagtatcctgattaaaaaagtggagaccacttccaccgcgatttcaatgaaaatgaataccaaaaaatgcgcaaaggcccactttactccaagaagaatgagagatgaagacgaggatgatgggcccaatagctcagggacagatgggaacatacccacactcgaaggtagcagcacctataagtacctgggcattgagcaaaccttcggtgtccaagagaccgatacgtgggaccgcgtggaggaaaagtgcagcgcagtggtgcagcagatttgggagagcgatttgacctttaggcagaaggttaactcttataacacgaaggttataccagctcttcgatatgtggtgctgaacgcagtcaagggtagcggcaagtaccagggcgtgctcctgaggggcgagcagtttgataaaaaaatccgacgactgctcgtcgaaaacaaggttcgctataaggcgtcatgtgtcgctcgcctctacctgaccgctggactgggcgggtatggactcaagagcgttaaagactccgtgatggaggcaacaatttacagctgggcatacctttgcactagaaatgacctgcgatctagcctgaatcttttctcctccatgtcaaagcgaggtaagcggtctgtgattagtgatgctgaatacgttctgaagtcctaccgaatcactgcagaactcacacctaacgaggcgactgtaaaagtaagtggagtgaagttcacagatgccagagagctcgccaggcacgtgatctctgtaatacgaactgaaaacgataccacacggcgcaaagaatgggaagtgaaggagttgtccggcagggtgctgcgctccgactcactggatatgcaggcctcctttgtctggcttcaggccggcaagctctcctcaacgacagtgcggaatgtgatagccgctcaggaaggttgcttgctcacccgagctcacccatcttgtatcgaggctgataagctctgtagggcttgtaataaatccttggagactattgagcatgtgctcgccggctgttctaaatggctcaccaccctttacatcgacaggcacgatagtgtagctaggaatctgcactatcggatttgcgaaaagtatgagctgaaaccccctcattactctcagcgcgtggaatctatcatggaaaacgacagggtcaaggtctactggggtcaaccggtgcagacaaagagcatcatccgacacaataagcccgacatagttatctttgagaaagccaccaggaagtgcactatcatagaatttgcagtttcatggttcacaggaattaccaggcaagtagacatcaagaccaacaggtattgcgtgaatggaaattgggaggaggacttgcagcttccgtaccctagaggtgataacttgttgagagaactccagactgaggggtggaaggtggagttcttgcctgtcgtgatcgggacatgtggagaagtgctcggcggattggccgggcagatctcagaaaaactgtctatttccactgacaaggctggggattgcgtcgagagaatggagcgcagcgcggtcctgggcacaagcaggatcatcaaaaaccacctgggactgcgcgatatctaa

SEQ ID NO: 1693 - DNA, 2367 bp, synthetic construct
  source 1..2367: mol_type = other DNA; note = FH-MCP-MG169-12
atggactacaaagacgatgacgacaagtacccctatgatgtacctgattatgctgccagcaatttcacacagttcgtccttgtagacaacggcggcaccggggatgttacagtggccccgagcaatttcgcaaacggcgtagccgagtggatctcctctaatagcagaagccaggcttataaggttacatgctctgtaaggcagtcttccgcacaaaatagaaagtacacaatcaaggtcgaagtgcccaaggttgctacacagaccgttggtggagaggagttgccagtggctgggtggcgctcctacctgaatatggagttaacaatccccattttcgctaccaattcagactgtgaactcattgtcaaagctatgcaaggtcttcttaaggatggtaacccaattccaagtgcaattgctgctaattcaggcatttattctggcggcagcagcggcggctcaagcggaagtgaaacacctggaacttccgaaagcgctacgcctgaatcttctggtggatcttctggcggatcttccgcatgcgtcgaccgcaaccctagaataatcctgaatactctccataaccatagcaaaatctctgattacaagtacgagcgattgtaccggattctttttaatgaggagatgtactatgtcgcctaccaacgcatatacgctaaaccaggcaatatgacagccgggactgacaataagacaattgacaacatgtcattgaagcgcatcaatgccctgattgaatctctgaagaatgagacataccagcctaagcccgcacgccggacctatatcccgaagaaaaacggcaaacttagacctttggggattcccactttcgaggacaaacttgtccaggaagtagcgagaatgatcttggagagcatatacgaagattattttgaatctaccacgcacggcttcaggccatttaagtcttgccacaccgcactgacgcaaatcaggaatacttttaccggtgcaaagtggttcattgaaggggacattaaaggcttctttgacaatatagatcacaacgtcctggtggacatccttaaggaaagaatagctgacgagcgattcattagactcattaggaagtttctcaaagctggatacgttgagcagtggcactaccaccatacctactccgggacaccccagggaggtatcattagcccaatcctcgcgaatatttatctggacaagttcgacaaatatatgaacgagtatgcagacaaattcaacaaaggcaaagaaaagagacttaacccacagtacctgaaggtaatcaggcaaatgaataatctccggaaaaagatcaagcgatgtaaggaggagattaagatcgaacagtacgagactgagtatagaaagcttaaacgcgaagccctgaatatgccctgtaggatggatatggatgaaacatatcgcagagtgaagtatgtgaggtatgccgatgatttcctgattggaatcattggaagtaaagcagattgtgagatgatgaaaaccgacattactcgatttatggagaaaaaccttaaactggaattgtctcaggagaagaccttgatcacacacgctcagaaagctgcaaagttcctggggtatgagattagtatacggaagagtatcgcttataagagaaacaaaaacaacgtgctgatgaagagcttcaacggaaacgtaatcctgacactccctatcgggatagttaaagaaaagctgctggactataacgccatgagcatcaaatcccccaaagggaaagaaatttggcaggccaagtataggggttttcttaataagcgcgatattgccgaaatcgtgagtcagtacaactccgagattcggggattctacaactactattcaatcgccaacaatatctccaaagctggcagcaagttcggtcacataatggaatattcaatgtaccatacaatagcgcaaaagaccaactcctccattagcgaggtgatcaggaagtacaccaaagatggcgattttactgtgccctacaccgactctaagggcaatgtgaggtttcgcgtcttttacaatgaaggcttcaaacggaaagaggccaacaagtatgctgactgcgataacatgccgaaagtctttcacgttccacggccttcactcgtggaacgactgaagacgtgtacctgcgagctctgcggacataagggggaggttgttatgcatcatgtgcggacgcttaagactctcaagggcgtcaaagagtgggacaaaatgatgcttcagaaacaccgcaagacactggtggtgtgcaagaagtgctacgccaccatcaataattgtaaggagatcgatatctga

SEQ ID NO: 1694 - DNA, 2391 bp, synthetic construct
  source 1..2391: mol_type = other DNA; note = FH-MCP-MG169-13
atggactacaaagacgatgacgacaagtacccctatgatgtacctgattatgctgccagcaatttcacacagttcgtccttgtagacaacggcggcaccggggatgttacagtggccccgagcaatttcgcaaacggcgtagccgagtggatctcctctaatagcagaagccaggcttataaggttacatgctctgtaaggcagtcttccgcacaaaatagaaagtacacaatcaaggtcgaagtgcccaaggttgctacacagaccgttggtggagaggagttgccagtggctgggtggcgctcctacctgaatatggagttaacaatccccattttcgctaccaattcagactgtgaactcattgtcaaagctatgcaaggtcttcttaaggatggtaacccaattccaagtgcaattgctgctaattcaggcatttattctggcggcagcagcggcggctcaagcggaagtgaaacacctggaacttccgaaagcgctacgcctgaatcttctggtggatcttctggcggatcttccgcatgcgtcgacgaaaatgtcagagatattatgcgaaaccctaaattggtactgaacagtctcagcgagcactccaggaacaccgattacaagttcgagcggctgtacaagaatttgttgaatgctgaaatgtactacgtcgcataccagaagatttatgctaaacccggtaatatgactcagggagtggatgggcaaactatcgacgatatgtccatcatgcgcattaaacagctggtagactctctgaaatcagaaacctacaggccgagcccaagcaagagaacctacattccgaaaaagaatggaaagaagcgccccctcggcattcctagttttgacgataaactggtgcaggaagttatccgaatgatattggaagcaatctacgagggtagctttgagcagacatcacatggattcagaaacaataggtcttgccacaccgccctcgtgtccctgcaaaaatcatttatcgggacaaagtggtttatagagggcgacatcaagggcttttttgacaacattaaccatgacgttcttatcaatatcctgcgcgagcggatcagagatgaacggttcattaacttgatacgaaaattcctgaacgctggatatgtagaggattggaaatttcacaagacttattctggaacacctcaagggggtgttgtgagtcccatcttggccaacatctatctcgacaagttcgataagtacgtgaaggagtacatccaaaagttcaacaagggcgaaaaacgggggcgaacagtggagtaccgcaagcttgagtgtcgcaagcggtatctctccaagaaactgaagaacgtcgagagcgaggaactttcaaacgccatcattagtgaaataaaagagattgataggaagagaacgttgataccatctaatgacaaaatggatgacggttttaagaggcttaaatacgtgcgctatgccgatgattttattctggggctgatcggctccaagaaggactctatgcagattaagaatgacataaaaggctatctgaacgacgtgctgaaactcgaactgtccgaagagaaaaccctgatcacccacacagagaaaccagcgaaattcctgggttatgagatctacattcgcaagacgaaccagactaaaggcaattcccttgggcgcaaggttagaacttttaattccaaggtcgtcctcagcatcactccagagataattaggaaaaagctgatcgagtatgatgctatacgcttcaaaactatcgatggcaaggaaatttggagaccaaaggcaaggccctatctgcttaatcacgatgacctggagattcttgaacagtataacgcagagatcagggggttctataactactactccattgcaaacaattctaaccttgtgtcaaatctgggctacatcatggagtactctatgtacaagacattcgcgtcaaagtataacaccacgatcagcaagatcataaataaataccgacgggccaaggaatttagcatcgcttataccgacaagtatggaaataccaaatacagagacttctataatcaggggttcaaacggaaacagccctattgtatgagccctaacgacttgattcctaatacccatataatcagtaactgcaggacaagtctcatcgacagactcaaggcctgtaaatgcgagatttgtggagcggaagagaatttgcacatgcaccatattcggaaactcaaggacctgaaaggcaagaagaggtgggaaattttgatgatcgccagaaagcggaaaacaatcgccgtgtgcattaactgccactacaagatccatgctggcaaattggatgatatctga

SEQ ID NO: 1695 - DNA, 2367 bp, synthetic construct
  source 1..2367: mol_type = other DNA; note = FH-MCP-MG169-14
atggactacaaagacgatgacgacaagtacccctatgatgtacctgattatgctgccagcaatttcacacagttcgtccttgtagacaacggcggcaccggggatgttacagtggccccgagcaatttcgcaaacggcgtagccgagtggatctcctctaatagcagaagccaggcttataaggttacatgctctgtaaggcagtcttccgcacaaaatagaaagtacacaatcaaggtcgaagtgcccaaggttgctacacagaccgttggtggagaggagttgccagtggctgggtggcgctcctacctgaatatggagttaacaatccccattttcgctaccaattcagactgtgaactcattgtcaaagctatgcaaggtcttcttaaggatggtaacccaattccaagtgcaattgctgctaattcaggcatttattctggcggcagcagcggcggctcaagcggaagtgaaacacctggaacttccgaaagcgctacgcctgaatcttctggtggatcttctggcggatcttccgcatgcgtcgaccgcaacccacagatcattttggatgctctgtgcagtcacagcaaggtaagcgactataaatttgagcgcctctacagaatcttgtttaatgaggagatgtaccacgccgcctacgagcgacttaaagtcaaacagggaaacatgaccccaggtaccgatggggatacgatggacgggatgagccttatgaagatcacaagacttattgacagcctcaaggatgagacttattctcccaaacccgccaggagaacttacataccgaagaagaatggtaagctgcgccccctcggtatccctagttggaatgataagctcgtgcaggaggttgtgaggatgattcttcaggctatctatgaaggtgcattctctgacaggtctcatggcttcagaccttaccggtcctgtcataccgccttgacacagattcaaaagacattcactggcgtcaagtggtttgttgagggcgacatcaaagggttcttcgacaatatagaccacgacattctcatcggcattttgcgagaacgcatatcagatgaaaggttcctgcgattgatccgcaaatttcttaacgccggatacgtagaggactggaaatttcatgaaagttatcacgggactccacaaggcgggattatttctcccattttggccaatatctatctggatcatttcgacaggcacatggcacgatacgcggaaaccttcaaccgcggcgagggtcggaaacgaaaccctgaatactttaatctgaatacaaagacctgtgctctgaggcgaaaactcagaaaggagaccgacgagaacaagcgagccgaattgagagaacggatttccctcatgcaagctaaacttaggacactgccatgcaaactggatattgacgacgattatagacgcattgtctataccaggtatgctgatgacttcctgatcggcgttatcggatccaaagaagattgtgagaggataaaagctgatataactatctatatgcgggactgtctgcaccttgaactgagccctgagaagactctcatcacccatgcccaagaaactgcaaaattcttgggttacgatattaccgtgcgcacatccgagcgaatgtcaaggacacggaacggcattcttcagagaaatcataagggcaaggtgcacctgcttctgaacagtgaaaccgttcggaaggccctggagaaatatgacgctgtgcagtatactagcgaaaatgggaagatcgtgtggaagccaaagtctcgcccaaagctgctcgccatgaaaccgcataagatattggaaagatttaactcagagatccggggattttacaactactactgcattgcaaataactgcagcggacagtgttccagttttgcatacatcatggagtattcactgtgcaaaacgctggcacagaagcttaacacgaccaagatcaagattaagagcaagtacacaaataacggccgcttctcaatctcataccggaccaaagacggatctatcaaagagtccgtgctgtataaccaggggttcgcaagaaaggcgaaaggatacgatgtgcagccttctgtggaatgccccaacgagtttcttcccgctacaacactggcccacaggctgaagtccggggtgtgtgagctctgtggcaaagacaatgaggtcctctacatgcaccacgtcagaatgatgagctgcttggataaaaatacgccttggggacggcaaatgctgaaacggcgacggaagaccctggcggtatgcaagacttgcatggatataatcaatcagtccaagcaggatatctga

SEQ ID NO: 1696 - DNA, 2358 bp, synthetic construct
  source 1..2358: mol_type = other DNA; note = FH-MCP-MG169-15
atggactacaaagacgatgacgacaagtacccctatgatgtacctgattatgctgccagcaatttcacacagttcgtccttgtagacaacggcggcaccggggatgttacagtggccccgagcaatttcgcaaacggcgtagccgagtggatctcctctaatagcagaagccaggcttataaggttacatgctctgtaaggcagtcttccgcacaaaatagaaagtacacaatcaaggtcgaagtgcccaaggttgctacacagaccgttggtggagaggagttgccagtggctgggtggcgctcctacctgaatatggagttaacaatccccattttcgctaccaattcagactgtgaactcattgtcaaagctatgcaaggtcttcttaaggatggtaacccaattccaagtgcaattgctgctaattcaggcatttattctggcggcagcagcggcggctcaagcggaagtgaaacacctggaacttccgaaagcgctacgcctgaatcttctggtggatcttctggcggatcttccgcatgcgtcgacagaaactcagagaacgtccttaatatccttagtgagcacagcaacgttagtggctataaattcgagagattgtataggatccttttcaatgaacaaatgttttatgcagcttaccagcggatttacgctaaacagggcaatatgacatctgggatggacggcaagaccattgaccagatgtccgtactgaggattgataaccttatcgtgtctcttcgcgatgaatcatacaagccccaccccgccagacgagtgtatatcccgaagaaaaatggcaataaacgcccgctcgggatccctagttttgaagacaagctggtccaagaagtggtgagaatgattttgggagcaatatacgaggggtattttgagtactcttctcacggttttcggcccaacaagagctgtcatacagccttgactcatatccagaaaacgttcagcgggactaagtggtttatcgagggcgacataaaaggattcttcgacaacatcaaccacgaagtcctgattaatgcgctccgggaacgcatcgcagatgaacgcttcatcaggcttattagaaagttcctgaatgccggttacgtggaggattggaagtttcacaagacttattccggtacgccacagggaggcctgatctccccaatcctggccaacatatacctggacaaattcgacaagtatatgaaggagtacgccaaatccttcgacaaaggtcgagagcggcagtcaagcaccgagtacaagcgactggaaaataagcgctctaggctcgtcataaaggcaaagtccgtcgaagacgagagtgtaagggcaaaccttattgatgaaatacgcaaagtggagtccgaaatcgtcaacacaccttacggcctgaacatggatgaaacctttaagcgcctgaagtacgttcgatatgccgacgattttctcattggggtcattggcagtaaggccgagtgcgtggaaatcaaagctaatattaccaggttcatgagcgaggaactgaacctcgagctctcagatgagaagacgttgattacacatgctcaacatgccgctaaattccttggatatgaagttagcatcagaaaatcacaggctttgagacacaacagaaatggcgttctgcggaggccttttaacggcagaatcgtgctgagggtcgctaacgaggtggtgaaaaaaaagctgctggactacgacgcaataagcgtaggacaagtgaatggcaaagaggtttggaaaccaaaaagcaggtcctatatgattggtatgaaacctgaggacataatggcccagtataatgctgaaatccgcggattctacaattattactccatcgcgaataacatttcatacctcgggaactctttcggatttaacatggaatactccatgttcaaaacaatcgcgcagaagcagaatagcacccttgcgcagacaatcaagaaactccgaaagggcaagaacttcattgtatcttacgttgatgggaagggacagaaacggacaagagtgttttacaacgagggctttaagagaaagactgccaaggggcacactcagtatgataatctgccaaataccaatatctctccctatcccagtctcattgagcggctcaagaccgaggtgtgtgagctgtgcggagccgagggtaagactgtgatgcatcatgtcaggaccctgaaagatttgaaggggaacaacgaatgggagcaacagatgtttaaacggcaccggaagactcttgcagtgtgcgagacctgtaatgccaaaattcacgtgagagatatctga

SEQ ID NO: 1697 - DNA, 2367 bp, synthetic construct
  source 1..2367: mol_type = other DNA; note = FH-MCP-MG169-16
atggactacaaagacgatgacgacaagtacccctatgatgtacctgattatgctgccagcaatttcacacagttcgtccttgtagacaacggcggcaccggggatgttacagtggccccgagcaatttcgcaaacggcgtagccgagtggatctcctctaatagcagaagccaggcttataaggttacatgctctgtaaggcagtcttccgcacaaaatagaaagtacacaatcaaggtcgaagtgcccaaggttgctacacagaccgttggtggagaggagttgccagtggctgggtggcgctcctacctgaatatggagttaacaatccccattttcgctaccaattcagactgtgaactcattgtcaaagctatgcaaggtcttcttaaggatggtaacccaattccaagtgcaattgctgctaattcaggcatttattctggcggcagcagcggcggctcaagcggaagtgaaacacctggaacttccgaaagcgctacgcctgaatcttctggtggatcttctggcggatcttccgcatgcgtcgaccgcaatagcactaatgtgctgaacagtctgtacaagcattgcaaggatttggactacaaatacgaaagactgtaccgcatcttgtacaacaaggacatgtatgccgtggcctatcagaggatcgctccaaaacaaggaaacatgaccgccgggaccgacggtaaaacaatcgatggtatgtctatcgagcggattgaccggctcatcgaatccttgaaggatgaaagttatcagccaaagcctagccgccgcgagtatattcccaaaaaaaacgggaaaatgaggcccctcggcattcctagtatagaagataaactgctccaggaagtggttcggatgattctggaggcaatctatgagggccagtttagtgactgctcccacggatttaggccacagcgcagctgtcatacagcaatggaacagatttctaaatcattttgcggggccaagtggtatatagaaggagacattaaggggttctttgataacataaatcacgatgtcatgattaaaattctggaaaagcgaatcggcgactgtcggttcataagacttatacgcaagttcctgaacgcaggctatattgaggactggcagtatttcaagtcctatgatggcacgccccaaggcggaataatcagccccatcttggcgaacatttacttggatcagcttgacaaatatatggaggaatatgcctcaaaatttgataaaggggtgcgaaaggaggtatctaagttgtaccggcattaccagagaaagaaaggacgagctaaggtggctctcaagaaagccacaactgccgaggagcggaatgaggccctcaggcttgttaaaatgtatgatagcttgatgatggtgacccctgccaagaatgaaggtgacaccaattataagagattgaagtacgtcagatacgcagacgactttctgtgtggagtgatcggatcaagagaagatgcaattaagatcaaagccgacattaaagaatacctggagtccaagctgcgcctggagctttccgaagagaagacactggtgacttattcaaacaatccggctaagtttctgggttttgaaataaggaatcggaaatgtgctgagacgagacgagatactctgggcaggaaaaaacggagcaggaataagacggtggagatcagaatcccaaaggataccgtaaagaagaagctccttgactacgacgtcgttgaaatcaagaaacacaacgggaaggagatttggaaacccaaagcccgacctgagttgaatttcaacgatgacctggagatcctgcagcggtataactccgagatccgcggcttttacaattacttcggcatcggcgtcaattgcgcaaaacagatgaataacttcggctacatcatggaatactctatgtacaaaactttcgctgctaagtacagatctaaggtcacaaagatttgcaggaaatataagaaagatgggatattcaccgttagctaccaaggtaagaagggcaacacaatcgaggcgaagttttacaatggaggcttcaagcgacttaaaccttccaaggacagcaggatctctacactcccaaacttcattatgcatacctctaccacctccctgatggacaggctcaaggcgcaaaaatgcgagctgtgtggggcaactgatcgcttggagatgcaccacgtacgaaaacttaaggggctcaagggtaaagaaccgtgggagcggatgatgattgccaggagaagaaagactatcgctctttgctcaagttgtcataagaaagtgcacaacggaaaagccgatatctga

SEQ ID NO: 1698 - DNA, 2367 bp, synthetic construct
  source 1..2367: mol_type = other DNA; note = FH-MCP-MG169-17
atggactacaaagacgatgacgacaagtacccctatgatgtacctgattatgctgccagcaatttcacacagttcgtccttgtagacaacggcggcaccggggatgttacagtggccccgagcaatttcgcaaacggcgtagccgagtggatctcctctaatagcagaagccaggcttataaggttacatgctctgtaaggcagtcttccgcacaaaatagaaagtacacaatcaaggtcgaagtgcccaaggttgctacacagaccgttggtggagaggagttgccagtggctgggtggcgctcctacctgaatatggagttaacaatccccattttcgctaccaattcagactgtgaactcattgtcaaagctatgcaaggtcttcttaaggatggtaacccaattccaagtgcaattgctgctaattcaggcatttattctggcggcagcagcggcggctcaagcggaagtgaaacacctggaacttccgaaagcgctacgcctgaatcttctggtggatcttctggcggatcttccgcatgcgtcgaccgcaatccagaaaaggttctcaacagtctgtcagttcactcccgcgagcaggagtacaagtacgagcgaatttaccgcatcctctttaaccctgagatgtactacgtcgcctatcagaggatcggtagtaagccaggcaatatgacatccggaagcgacaatgaaaccatcgacgggatgtccttgaaacggatagaagatatgatcggcagactccgcgatgagtcctaccagcccatgccctcacaacgcgtgtatatcccgaaaaagaatggtaagctcaggccattggggattccggcgatcaatgataaattggtgcaggaagtagtgaggatgatcctcgaagctatttatgagcctcagttcagcaacatgtctcacggctttcgaccatctaggagctgtcacaccgctctggcttcaattgagaagactttctgcggaatcaagtggtttatcgaaggtgatataaaaggcttcttcgacaacatctcacacgaagtaatgatagggattctgaatgagcggatcggtgacgagaggttcatccggcttatcagaaagttccttcgggctgggtacttggaggattggaagttccaccatacctatagtggcactccccagggcggaattatctctcctatcctggcaaacatctatttggacaagcttgacaagtacgtggaagaatacatacaatcattcgacaaaggcatggggcggaaaatgagcgagatgtacaagtccctgcagtataaaagaaagtgggcaatgtacaagctgaaggagtgtagggagaaaggtgctaaacgcaaacctcttgtgaacaatctgaaaacacacattaaagccatggccagcgtttcttgcggggacgaaatggacgcaggatacaagaggctcaaatatgtccggtatgccgacgatttcctgatgggtgtaatcgggtccaagaaggatgccgagactatcaaagaagacatcaaaaaataccttactaacagactgtctctggaaatgtctgatgagaaaacgctcattacgcacagcggcgacagagcaaaatttctgggatacgaggtgtgcgtgcaaagaagtagcagcatgagacggtctaaagatggctcactccgcagagcctttaataaaagagtccggcttatgctgcccaaggaccttattaagaagaagcttctcagttacaatgcggtggagattaagacacataacggaaaggagttttggaagtccaaatcccgaggaggcctgacagccctggatgatctcgagatcctgaagcgatacaatatggagattaggggactttataattattacagcttggcccataactgttgcgaaatggcccagttcggctatattatgaagtacggcatgtataagacctacgcccacaagtatcggacaaagagtaaggctatccatcgcaaatatgataaggatggcgtgtttacccttacaatacagctcaaaaacgggaagtcaaaagactatacgttttaccagggcgggtacaaaagacaatccgcaatcgaactggctaaaattgactatgcgccctcccttatggtctttaaaaccaccacttctctgattgaccgactgaaggccggtaagtgtgaaatttgtggagctactgagaacctggtgatgcatcatgttcgaaagctgggagaactgaaaggcaaaagcacatgggagaaacttatggtcgcaaggaacaggaagaccatagccatttgcagtaagtgccataagcagatacacttggggaacggggatatctga

SEQ ID NO: 1699 - DNA, 2469 bp, synthetic construct
  source 1..2469: mol_type = other DNA; note = FH-MCP-MG169-18
atggactacaaagacgatgacgacaagtacccctatgatgtacctgattatgctgccagcaatttcacacagttcgtccttgtagacaacggcggcaccggggatgttacagtggccccgagcaatttcgcaaacggcgtagccgagtggatctcctctaatagcagaagccaggcttataaggttacatgctctgtaaggcagtcttccgcacaaaatagaaagtacacaatcaaggtcgaagtgcccaaggttgctacacagaccgttggtggagaggagttgccagtggctgggtggcgctcctacctgaatatggagttaacaatccccattttcgctaccaattcagactgtgaactcattgtcaaagctatgcaaggtcttcttaaggatggtaacccaattccaagtgcaattgctgctaattcaggcatttattctggcggcagcagcggcggctcaagcggaagtgaaacacctggaacttccgaaagcgctacgcctgaatcttctggtggatcttctggcggatcttccgcatgcgtcgaccgcaactccgccaaggtcctgaatggcctgagtaagcatagcccattgtcaaattaccgatatgaaagactgtaccgcttgcttttcaacgaggagatgttctacaccgcgtatcagagaatttatgcgaaagaggggaatatgaccgctggatccgacgggaaaacgatcgatggcatgagcctcaaccgaatctccaagctgatagatttgttgcgcactgaaacctaccagccccaacctgcccgcagggtgtacattccgaagaaggacgggaagatgagacccctcggcattccgtcttttgatgacaagttggttcaagaagtgacaagaatgatactggaggccatttatgaaggccagttcctggattgttctcacgggtttcgacccaagaggtcctgccatactgcgctggtaaaggtgaagcggacgttcaccggggccaagtggtttgtggaaggggatataaaaggctttttcgaccgaattgagcaccagattctcataacaatcttgaaggaaagaattagcgacgaccgatttctgcggctcatctggaagttcctcaaggcaggctacgttgaggattggactttccacaatacctttagcggcacacctcagggaggtatcgtttcccccatccttgctaatatctatctggacagattggacagatacatggagaagtacgcagaggaatttaataaaggaacaaaacggaaacctcacgagactaggtacgggttcgagaacaaaaaagcacggcttatgcaaaagttgaaaaacgtcaaggacgaaaacgagcgcagggaaatcgtgaaacagatcaaggtaatcgacaaagagaggattactttcccttcctgtgacgagatggacggcgggtataagcggttgaaatacgtgcgctatgcagatgattttctgattggtattatcggatccaaggaggactctaagcaagtcaagaacgacattaagaattttctggagaccgaactgaagctcgagctgtccgaggaaaaaacccttattacccatacagagaaaccagcaaagtttttgggttatgaggtgtcagtaagacagagcgacctgccaagacgagacacactcaataggctgactagaacatataacaacaaggtttgcctgcggatcactatggacattatcaaaaaaaagctgctcgattttggaatcgtcgagataaggcacaatgtgaacggaaaagagtggtggaagcctcgggaacatacaaagatgctcaataacgatgatctcgaaatcctgcggatgtataattatacgctgcgcggcttctacaactactacagtgttgccaataatagtgctattatgaacgcttacggatacattatggagtatagcatgtaccggactttcgcctgcaagtacagaaccagtgtgcagaaaatcttgaggcaatatcagcgggatggagtgttcacagtgagctacaccaccaagaaagggggcgtgaggtcacagagtttctacaaagacgggttcaaacgcaaggagccaatcgccgatgtcaacctggattctcaggaggtcatctatcactctatgaggacctctctcatcgatcgacttaaagctgaaaagtgcgaaatatgtggcgccatgggtaaattggatatgcatcacgtcaggaaaattaaggacttggacggtaaaggatacgccgataaacttatgatcatgaggcagcgcaaaacaatcgcattgtgtagatcttgccatcttaagacgcacgccggctcaatagatcgcccctttaacggcgaacccgacactctgcggggtgtgtcaccagtacgaggtcgagctttcgaaaatcttcctagcaagtatggaaaagctctgggcgccgatatctga

SEQ ID NO: 1700 - DNA, 2358 bp, synthetic construct
  source 1..2358: mol_type = other DNA; note = FH-MCP-MG169-19
atggactacaaagacgatgacgacaagtacccctatgatgtacctgattatgctgccagcaatttcacacagttcgtccttgtagacaacggcggcaccggggatgttacagtggccccgagcaatttcgcaaacggcgtagccgagtggatctcctctaatagcagaagccaggcttataaggttacatgctctgtaaggcagtcttccgcacaaaatagaaagtacacaatcaaggtcgaagtgcccaaggttgctacacagaccgttggtggagaggagttgccagtggctgggtggcgctcctacctgaatatggagttaacaatccccattttcgctaccaattcagactgtgaactcattgtcaaagctatgcaaggtcttcttaaggatggtaacccaattccaagtgcaattgctgctaattcaggcatttattctggcggcagcagcggcggctcaagcggaagtgaaacacctggaacttccgaaagcgctacgcctgaatcttctggtggatcttctggcggatcttccgcatgcgtcgaccggaatagtgaaaacgtccttaatatcctgtccgaacacagtacagatagcgactacaaatacgagagactgtatcggaatcttttcaacgagcagatgttctacaccgcctaccaaagcatctatgctaaacagggaaacatgacttcagggactgacggaaggaccatagatcagatgtccatccaacgaatcgatgacctgattgtttccctcaagaatgagacctataagccgcgacctgctaagagagtgtacatcccgaaaaagaacggcaagaagaggcctctgggtatccctagctttgaggataaattggtgcaggaagtgaccagaatgattctggaggccatctacgagggttattttgagtacaccagtcatggatttaggccaaacaagagctgccacacagcacttactcatattcagaaaagcttttccgggacaaagtggttcgtagaaggggacatcaagggcttctttgataacattaatcacgaggtactggtgaaaactctcaaggaacggattgccgacgagcgctttataagattgattaggaagtttctcaatgctggttatatggaagactggaaatttcataagacatactctggaactccccagggaggacttatatccccaattctggccaacatttacctcgacaagttcgacaaatacatgaaggaatacgcaaaaagtttcgataaggggaaggagcgccggggatctaccgagtataagaggctcgagaataagagatctaggctggtggccaagacgaaatctggccagaacgaatccgttagggagcaactcatggacgaaattagaaaggtcgaaaaggagatgattaacacaccctatgggctcaacatggatgagacatttaagcgcttgaaatacgtcaggtacgctgacgatttcttggttggagtaatcggttcaaaagctgaatgtatgcagattaaagccaatatagcacagtatatgtcagagcagttgaaactcgagctgtccgaggagaaaaccctgattacacacgcccaaaatcccgcaaagttcctgggctacgagatatatgtccggaagagccaagcactgagacgaaaccgcaatggggtgctgcgccgaccttttaatgggcggatcgtgctgaacgtgtctaatggcaccgtgagacggaagctgcttgactacgacgctgtgtatatcaaacaggttaagggaaaagaagtgtggaaaacaaaggcccggtcatacatgatcgggatgaaacccgaggatatattggcgcagtataacgctgagatccggggcttctacaactattattcaatagcgaataagatttcttacctgggcaacagcttcgggttcaacatgcagtatagcatgttcaagacgatcgcacagaagcagaatatgaccatggcccaaatgatcaaaaaactccgcaagggcaaagatttcatcattccctacattgacaagaagggccagaagaaggtcagagtgctctacaacgaaggctttaggcgcaaaactgccaaggattatgcccaatgcgacaatatcccaaacactaatatcagtccttatccatctctggtcgaacgactcaaagccgaacgctgtgaactctgcggcgctgaaggcaaaactgtaatgcaccatgtgaggaccctgaaggatctgaaaggtgagaatgagtgggagcagcagatgcttaaaaagcacagaaaaaccctggcagtttgtgaaacgtgcaacgcgaaaatccatgtccgagatatctga

SEQ ID NO: 1701 - DNA, 1860 bp, synthetic construct
  source 1..1860: mol_type = other DNA; note = FH-MCP-MG153-58
atggactacaaagacgatgacgacaagtacccctatgatgtacctgattatgctgccagcaatttcacacagttcgtccttgtagacaacggcggcaccggggatgttacagtggccccgagcaatttcgcaaacggcgtagccgagtggatctcctctaatagcagaagccaggcttataaggttacatgctctgtaaggcagtcttccgcacaaaatagaaagtacacaatcaaggtcgaagtgcccaaggttgctacacagaccgttggtggagaggagttgccagtggctgggtggcgctcctacctgaatatggagttaacaatccccattttcgctaccaattcagactgtgaactcattgtcaaagctatgcaaggtcttcttaaggatggtaacccaattccaagtgcaattgctgctaattcaggcatttattctggcggcagcagcggcggctcaagcggaagtgaaacacctggaacttccgaaagcgctacgcctgaatcttctggtggatcttctggcggatcttccgcatgcgtcgactctgagataccagtgcatccccggagcagaagacttgccgactggatcaaccctacaggcgctagaaaagtccacagtctggtggacaaggtgtatcaacggaagaatctggagatggcctgggaaaaagttaaagcaaatcgtgggtcaggcggagtagacggtcagtctttagaagcatttgccgctcaactggaccagcaattggctcggcttcagtccgaactgatagaagacgcatatcagccacagccggtcagacaagtacaaatccccaaggccgggaagcccggagaatttcgtacacttggtgtcccgacgatatacgaccgggtgtgccagcaagctcttttgaaccgtctcgagccaatcttcgaacctgtgtttgacgaagctaactttgggtacaggagagggcgctcaactaaagacgctatgcgcaaagtctggaaggaaattcaatccggaagagaatggatcgttgatgccgatcttcgggatttctttggatccgtggatcacgagaagctgcttactctcgtagctcagaggatcgctgatggccgcgtgcttcgattgatacgcggcatgttgaaagccggcagctacggcaaaggaagattattccccagcgaaagagggacaccccagggcagcgtggttagcccattactgtcaaacatcctgttaaccccctttgaccaagagatgcgaagaaaaggttaccagctgacaaggttcgccgacgactgggtagtgacttgcacatctgcggccgaggctcgcgctgccatcgcagccgctttacggatcctgtcagagcttggggtccaattacatccacagaaaacgcgggtcgtgcacgtccagcgaggttttgagtttctgggttatctcgttaagcgaggaaaacaactccagctcccgccttctaaaatcgtgactggcgctaaaagcaggggtttgtacgcataccccagagaaaagtccattcaaagattcaaggatcgtgtgcgacaacttactcgccggggggtgccactgaaaactaatgacctcatcgaacagctgaaccctgtcctgagaggctggggtcattattataagagagctcatgtgcgcacactgttcaataaattggaccactggatcgagagacgaatatggagtcatcgttacaagtgttggcggaactgcggatggaagcagttgcccaagcggaagttatacggtgagtatggtctcacgcaactcgtaaagctgatcccctctatcgcgctccagaaccgggcacctagtgatatctga

SEQ ID NO: 1702 - DNA, 1953 bp, synthetic construct
  source 1..1953: mol_type = other DNA; note = FH-MCP-MG153-59
atggactacaaagacgatgacgacaagtacccctatgatgtacctgattatgctgccagcaatttcacacagttcgtccttgtagacaacggcggcaccggggatgttacagtggccccgagcaatttcgcaaacggcgtagccgagtggatctcctctaatagcagaagccaggcttataaggttacatgctctgtaaggcagtcttccgcacaaaatagaaagtacacaatcaaggtcgaagtgcccaaggttgctacacagaccgttggtggagaggagttgccagtggctgggtggcgctcctacctgaatatggagttaacaatccccattttcgctaccaattcagactgtgaactcattgtcaaagctatgcaaggtcttcttaaggatggtaacccaattccaagtgcaattgctgctaattcaggcatttattctggcggcagcagcggcggctcaagcggaagtgaaacacctggaacttccgaaagcgctacgcctgaatcttctggtggatcttctggcggatcttccgcatgcgtcgacaaggcagaagaaactagacaagtgaccaccctgaccgaggagctcgccagaaacgcagatggcgccgccatgggtgctgaggctggggtcatgacacgcctgcggacgaaggcagagttggagcgcggtggaggactgatggaggcagtgtgtgaaagaggcaatttgatgttggcgtaccagcgggttgtggaaaataaaggagccgcaggggttgatggcgtcggtgtcagcgagttcaaagatcatctccggcagcattggccaaccatcaaagcaaagctgctcgatggtgattacgtacctcagcccgtgcggcgtgttgacatccctaaaccccagggtggggtaaggacactgggtattcctactgtcaccgaccgactcatacagcaggctctccatcaagtcctgtccccaatttttgaagaaggattcagcgcctctagctatgggttccgacctggaaggaacgcccaccaggccgtaaaggcagccaagcagtacgtcgctgaaggaagaagagtagtagtagatatggaccttgaaaagttttttgaccgcgtcaaccacgacctccttatggagaaactgtctaaaaaaatcgacgacagacgggttcatagtctgattcggaggtacctcgaggctggcatgatggccgagggtattgtgagcccacgtacggagggcaccccccagggtgggcccctttcccctttgctttcaaatatactgctcacggaactcgacagggagcttgagcggcggggacatgctttctgtcactatgccgacgactgcaacatttacgtcaagagcaaggttgccggagaaagagttatggccagtctgacaaggtttctgtccgatacgctcaaactgaccgttaatgtcgcaaagtccgccgtcgcccacccctgggagaggaagttcctgggctatggtatgacgtggcacaaagcccccaggctgagagttgcgagtgccagcctgaaaagactggaggacaaaattcgcgaagtgctcaaaggcgctcggggaaggagcttactcaaggttattgacacgattaatccaattctgagagggtggaccgcctacttcaagttggcggaaacaaaaagggtgatggaaaaaatggacggatggatcaggcacaaactgcgttgtatgatgtggcgacaatggaagagaccacatgcacgagccagaaacttgatgaaagctgggctgatggaggagttagcttggcgttcagcttgcaaccagaggggtccatggtggaatagcggagctagtcacatgaaccacgccttccccaaagtgtatttcgatcgcttgggcctcgtgtcaatattagataccgtaaggcgcctgcagtgcattcaggatatctga

SEQ ID NO: 1703 - DNA, 1935 bp, synthetic construct
  source 1..1935: mol_type = other DNA; note = FH-MCP-MG153-60
atggactacaaagacgatgacgacaagtacccctatgatgtacctgattatgctgccagcaatttcacacagttcgtccttgtagacaacggcggcaccggggatgttacagtggccccgagcaatttcgcaaacggcgtagccgagtggatctcctctaatagcagaagccaggcttataaggttacatgctctgtaaggcagtcttccgcacaaaatagaaagtacacaatcaaggtcgaagtgcccaaggttgctacacagaccgttggtggagaggagttgccagtggctgggtggcgctcctacctgaatatggagttaacaatccccattttcgctaccaattcagactgtgaactcattgtcaaagctatgcaaggtcttcttaaggatggtaacccaattccaagtgcaattgctgctaattcaggcatttattctggcggcagcagcggcggctcaagcggaagtgaaacacctggaacttccgaaagcgctacgcctgaatcttctggtggatcttctggcggatcttccgcatgcgtcgacgcagagaaaccaaaagatagtaggcgagtggcagggggaacaagggaacgcaagggttgggagcgccaggcctctgcagtgggtactgaggaaccccgccccaaggccgaggacctgctcgaggaggtgttacggagagagaatctgatgcaggccctgaagagggtccggtcaaatagaggcgctcccggtgtggacggaatgactgtagacgctcttacccctcatctgaaaggcaattggccccgcatcagggaggaattgctcaacgaaacttatgtgccacagccaatccgcagggtggaaatacccaagcccgatggaaaaggtgtgagacaactggggatccccacagtgttagataggttaatccagcaatcaattttgcaggttttaactcccgtgttcgatcctcatttttccgaatcctcttacgggttccgtccaggtagagggtgccatgacgccgtcgttgctgcccgttcccacgtcgaggctgggtacaggtttgttgtggacatggacctggaaaaattcttcgatcgcgtcaaccacgatgtgctcatggctcgggttgctaggcgcatcggggacaaacgtttattaaggctcatccgtagatacctgaccgcaggagtcatgattgagggagttgcccaggcccgtgaagaaggcacgccacaagggggcccattgagccctcttctgtcaaatattttgctcgatgacttggataaggaacttgagcggaggggccaccgattctgtcggtatgccgatgattgtaatgtgtacgtcaaatccaaagcagctggtgatcgtgtgatggaaagcatcgctcgctttctcgaaaagcgtctccgactgaagattaaccgcgacaaatcagccgtagataggccatggtcaagaaagttcctcgggtacacaatgacgcctcacgaccgaccaaagttaaaggttagtccccagagcgtcaagagagcaaaagcacacataaaggagatcgtcaggaagggacgcgggagaagtcttgctaaagtcatcggtgagcttaccccgtatcttaggggttgggtgacttattaccgacttagccaggtgaagaacatctttgaagagcttgacaagtggattagacggaagctgaggctcatcctctggaggcagtggaaaaagccgaggacccgggccggaaaaatgatccggctggggattgagcgcgcccgtgccttgacatcagcttataacggtagagggccatggtggaatgctggtgcttcccacatgaatgctgcaattacaataaaatggctcaataggcgtgggctgacctcccttctggccgagcatcaacgtttagcttgccttgccgatatctga

SEQ ID NO: 1704 - DNA, 1872 bp, synthetic construct
  source 1..1872: mol_type = other DNA; note = FH-MCP-MG153-61
atggactacaaagacgatgacgacaagtacccctatgatgtacctgattatgctgccagcaatttcacacagttcgtccttgtagacaacggcggcaccggggatgttacagtggccccgagcaatttcgcaaacggcgtagccgagtggatctcctctaatagcagaagccaggcttataaggttacatgctctgtaaggcagtcttccgcacaaaatagaaagtacacaatcaaggtcgaagtgcccaaggttgctacacagaccgttggtggagaggagttgccagtggctgggtggcgctcctacctgaatatggagttaacaatccccattttcgctaccaattcagactgtgaactcattgtcaaagctatgcaaggtcttcttaaggatggtaacccaattccaagtgcaattgctgctaattcaggcatttattctggcggcagcagcggcggctcaagcggaagtgaaacacctggaacttccgaaagcgctacgcctgaatcttctggtggatcttctggcggatcttccgcatgcgtcgacatcgaacagattctgacaggcaaaaatctcctgagggctatgtaccaggtgaggaaaaaccatggatccgccggggtggaccacatgcccgtcaccaagttatccgaattgatgtcagtgaatcgcgacgagttgacagagaaagttagaagcggaaagtacctgcctcacgccattctgggggtcaagataccgaaaggaaacggcaaaatgagacttttaggaatcccgacagttactgaccgacttctgcagcaggccgtgctgcagataattaccgcaaaatttgagttcgaatttctggatagttcatacggatttcgtccaaatagaaacctgcaccaagcggtgttgaaagcgcaggggtacatcaatgagggttttcagcacatcgtagacatagatctgcagaccttttttgatgaggtggatcattgttacctgctgcaactgcttcatcgtaaaattaagtgcatagctacgatgaggctcattcgaaagtggctccgcgcccccatcctgatagatggtaagctcgtcaagagaaggaaaggggtgccccaggggtcacccctttcccccctcctctccaatatcatgctgcacgaactggatcgtgagctggagaggcaaaaccttaggttcgttagatatgctgacgatttttcaatctaccttaagaccaagagtaaagcaagacgggtgggtaatacaatttataagttccttcgggataagctgaagctgaaaattaatagagaaaagagtggcataaggcggcctgtgcatttcgttctgctcggatttgggttcgtacccacttacaagaaaggtgaaaggggcaagtatcaactggtcgtaagtgagaagagttggaaaaaacttaagcaaaaattgaagactatcacacggaaaactactcctatgagctttaaggaaagaatccagaaattgaatgaggtccagcgaggatgggtcaacaatttccgtatggcgtctatcctcgttaaactgcaagacgtcgatgggtgggtacgaaataggctgaggtactgcatatggcatcattggaaaaagagtgaacgcaagaggaagaacctgatccggctgggcgtggaacagggacaggcatacgcctggagccgaagccaaatgggagggtgggcaattgcccaaagccctatactcggaactactattacactggataggttgaagaagcggggttacgagtccatgttagatatataccgcaggaaaagcccacagctgaatgaacctctgtatacaagacctgtgaggactgtcttcgatatctga

SEQ ID NO: 1705 - DNA, 1782 bp, synthetic construct
  source 1..1782: mol_type = other DNA; note = FH-MCP-MG153-62
atggactacaaagacgatgacgacaagtacccctatgatgtacctgattatgctgccagcaatttcacacagttcgtccttgtagacaacggcggcaccggggatgttacagtggccccgagcaatttcgcaaacggcgtagccgagtggatctcctctaatagcagaagccaggcttataaggttacatgctctgtaaggcagtcttccgcacaaaatagaaagtacacaatcaaggtcgaagtgcccaaggttgctacacagaccgttggtggagaggagttgccagtggctgggtggcgctcctacctgaatatggagttaacaatccccattttcgctaccaattcagactgtgaactcattgtcaaagctatgcaaggtcttcttaaggatggtaacccaattccaagtgcaattgctgctaattcaggcatttattctggcggcagcagcggcggctcaagcggaagtgaaacacctggaacttccgaaagcgctacgcctgaatcttctggtggatcttctggcggatcttccgcatgcgtcgacctggatagttataaacgggtgacatcaaataaaggagccccaggtattgacaatatgtgtgttgactctctccatgagcaccttaaagaatattgggattctattcggaaccaaattgagaccgccacttatattccccaaggagtgcggaaagttgagatacccaaagcaaatggtggagtgagactgcttggtataccaactgtgaccgatcggcttattcagcagtccattgcccaagtgctctcccgacattacgacagcagttttagcgaaaacagttatggatttcgtccttgtaggagtgcccaccaggcagttatcaggggccagggctatctgaatgaaggctatacccacattgtcgaattggacctggagaaattttttgacaaagtaaaccatgataagctgatgactgttctgagcagagttgtaattgataaacccttgcttaagctcattagacggtatttaaggagtggtatcatggatggtggcctggtcagtgtgcgaacagaaggcactccccagggaagcccgctgtccccaatcctgtccaacattctccttgacgaactggataaagagttagaaaaccgcgggctgcgatttgtaagatacgccgatgatgtatctatctatgttaaatctaagagatcagcacagcgggtgctcagttccattacagggtacattgaaaatgtgctgttgctgaaagtcaatacagtcaagtctaaggtgtctctgcctagcaagtctagtttgctgggttttacctatggtaagtctggacggtcttggaagccccggatttcaagcaagtcaaagaggtctattaaagataaaattaaacttgccacaaaaagaaactggtcagtgaacatcgaagatcggctgaggaaattgagccagatcacccagggatggctctcttattataagttagccgagtgtggggtgttcctgaaagaactcgactgctggattcgtttcaggattaggatgtgcatttggaagtcatggaaacgtcctaaaaaacgcattcgggaactggttaagcttggtattgagaaatggagagcatatatgaacggcaacacaagaaaaggatattgcaggatcgctcactccggcattcttcatacggcattgactaacaacaaactgtgccacctcggcttccacagcctctttgactcttacaaatcttgctacgtagatatctga

SEQ ID NO: 1706 - DNA, 1860 bp, synthetic construct
  source 1..1860: mol_type = other DNA; note = FH-MCP-MG153-63
atggactacaaagacgatgacgacaagtacccctatgatgtacctgattatgctgccagcaatttcacacagttcgtccttgtagacaacggcggcaccggggatgttacagtggccccgagcaatttcgcaaacggcgtagccgagtggatctcctctaatagcagaagccaggcttataaggttacatgctctgtaaggcagtcttccgcacaaaatagaaagtacacaatcaaggtcgaagtgcccaaggttgctacacagaccgttggtggagaggagttgccagtggctgggtggcgctcctacctgaatatggagttaacaatccccattttcgctaccaattcagactgtgaactcattgtcaaagctatgcaaggtcttcttaaggatggtaacccaattccaagtgcaattgctgctaattcaggcatttattctggcggcagcagcggcggctcaagcggaagtgaaacacctggaacttccgaaagcgctacgcctgaatcttctggtggatcttctggcggatcttccgcatgcgtcgacgggctgatggaggtgatactcagcaaggagaatttgaaccaggcatataagaaggtcgtagcgaataagggcgcctccggcatcgatggagtcactgtggaggagcttggcagctatattcgggaaaaccaagaagagatcaggaacgcattgcgcaatcggacatatttccctaagccagtcagaagagtgtacatccccaaaggtaacggcaaaaaacgacctctggggataccaacagcattggaccgaacaatccagcaggctgttgcccagcctataatcgacatctacgaaactgtgttctctgagtactcctacgggttcagacccaatcgatcctgtcacgacgccataaggcaggccttggaatatctcaatagcgggtacgaatgggtgatagacattgatattgaacagttctttgataaggtgaaccacgacaaacttattcaaatccttcgagagcaggtgaaggactctaacgtattgaacttgatccgaaagtatctgagggctggcgttatggaagaggggattattaaggccacaaagacaggtgttcctcaagggggccccatcagcgtgatcctgtcaaatgtatatttggataagctggataaagaactggagcagagaggattgaggttcgtcaggtatgctgacgatgtgcttatcttcaccaaatctgagaaggctgcaaatagagtaatgacgagcatctcctcctggatcgaaagaaagttgtttttgaaggtgaatgccacgaagtccaaggtcggtcgcccgatgcgtacaaaatatctcggtttcacctttctgaagaacggaggtcaatggaaggtgaagcccacgaacgaaaaaaaagccaatctttaccaagttatgagagagtatcttaagcgcgggaaagccacttctcgccctcttgccgttaccattcgtcgggtcaaccagattgtgatgggctggattaattactttagaattggaatgatgaagcagtttatggaggagttcggccagtggcttaggcataaaattcgcgttatcgttattaaacagtggaagagaccaaagaccatcttcagaaatcttagttacttaaataggaagtataaaaatgggtttaacgaagagtctattttcaaggtagccaacagtaggctcggtttatacaaaagttgcggcatgaacgtcgttaattatatactgtctcccaatctgcttgaaaccaaaattaaagatggtgctggactgttgaacccattgaaatattacctgcgaaaggtcggtattgatatctga

SEQ ID NO: 1707 - DNA, 1968 bp, synthetic construct
  source 1..1968: mol_type = other DNA; note = FH-MCP-MG153-64
atggactacaaagacgatgacgacaagtacccctatgatgtacctgattatgctgccagcaatttcacacagttcgtccttgtagacaacggcggcaccggggatgttacagtggccccgagcaatttcgcaaacggcgtagccgagtggatctcctctaatagcagaagccaggcttataaggttacatgctctgtaaggcagtcttccgcacaaaatagaaagtacacaatcaaggtcgaagtgcccaaggttgctacacagaccgttggtggagaggagttgccagtggctgggtggcgctcctacctgaatatggagttaacaatccccattttcgctaccaattcagactgtgaactcattgtcaaagctatgcaaggtcttcttaaggatggtaacccaattccaagtgcaattgctgctaattcaggcatttattctggcggcagcagcggcggctcaagcggaagtgaaacacctggaacttccgaaagcgctacgcctgaatcttctggtggatcttctggcggatcttccgcatgcgtcgacgcccagcctcaggcaatcacttatcagtatgacttgttctctgaacagagacaggacgtaatacggccgtttcctacttccgagacggtttgtggggcttcaggcaccaaggcctttcaggtgaaggaggcaggtgaacaggagcgtgcacttactcccgatctgatgtcactggttctgtcacacgacaacattaaggcggcgtacaagcaggtaaagcggaacaagggtgttgcaggaatcgaccagatgcctacaggagatttcgcagagtggtattcccagaatgctgagacactgcagtcagagctctataatggtgcttaccagccacagggcgtgaaacaggtcgaaattccgaagcctaacgggggtaaacgtaaactgggaatccctaccgtgaccgacagaatcatccagcaagctatcagtcaggtgctgaacccaatctacgagcgcaaattctcagatcatagctatggctttagaccaaatcggaacgcacatcaggcccttaagaaagggagcgagtacgtttctgaagggcgggtgatcgttgttgatatggacctgaaaactttttttgatgtcgtgaaccacgaccgcttaatgtacttgctgagtactacaatctccgataagacactcttatggctcattcgcaagtatcttcagtcagggattttgattgacggcgttgtgtcccagcgcaccgaaggaatgcctcaggggtccccactgtcaccacttttatctaatatcgttttagatgaacttgacaaagaattggagcggagagggcataaattcgtgcgctatgcagatgactgcaacatctatgtgagatcacagcgggcaggcgaacggctcctggcaagcatttctgtatttattgaaaccaagttgaagctgctggtcaacaaagagaagtctcgtatctgccccgtgaatcacacaaaatttctgggctatactatacagcgagacggttcactgagcatcgctaatgagagcgtgaagaggttcaaggaaaaggtcagaaagctgaccaaacgcaatcgtggcgttaactttgagcagattattgtggagttggaacccgtgatgcgcggctggctgaattactttaggcacgcccggtgtaagaggctgctggaaaacattgactcctggatcaggcgaaaactcaggtgctacaggctcaaacagtgcaagcgcgtgattacactgcaacagttccttaaatctcatggggtggagacttggcaaagctggatcttggctttatctggtaaaggcctctggtgtaaaagtgggtgtccccaggcacatcaggcactttctaacaggtggttcaatgacgtaggcctttacaatctgagtttgaattatgccaggttaaaccacgatatctga

SEQ ID NO: 1708 - DNA, 1848 bp, synthetic construct
  source 1..1848: mol_type = other DNA; note = FH-MCP-MG153-65
atggactacaaagacgatgacgacaagtacccctatgatgtacctgattatgctgccagcaatttcacacagttcgtccttgtagacaacggcggcaccggggatgttacagtggccccgagcaatttcgcaaacggcgtagccgagtggatctcctctaatagcagaagccaggcttataaggttacatgctctgtaaggcagtcttccgcacaaaatagaaagtacacaatcaaggtcgaagtgcccaaggttgctacacagaccgttggtggagaggagttgccagtggctgggtggcgctcctacctgaatatggagttaacaatccccattttcgctaccaattcagactgtgaactcattgtcaaagctatgcaaggtcttcttaaggatggtaacccaattccaagtgcaattgctgctaattcaggcatttattctggcggcagcagcggcggctcaagcggaagtgaaacacctggaacttccgaaagcgctacgcctgaatcttctggtggatcttctggcggatcttccgcatgcgtcgaccatattatgactactctgctcgacaagatcttggaccggcagaacatgtaccaagccttgaagaatgtgtgttccaacaagggagcatccggcgtggatggcgtcacgatcgatgagatagatggctacattagagagaactggcctcgcattaaagtggaaattgaagagcggtcctataaaccacaaccagtactccgggtggaaatacctaagccaaatggaggtacccgcaagttgggcataccgaccgttatggatcgcatcatccagcaagcaatagttcaagtgttaagccccattgtggacaaggagttttccgaacttagctatgggtttaggcctcgcaggaattgtgagatggctgttgtgaagttactggagtattttaacgatggctacttgtgggtcgtggatattgacctcgagaagttctttgacaccgtgccccaagacaagcttatgtctctgattcacaatatcatcgatgatccagacacagaaagtttgatccgacggttcctgcaggccgggataatggataagggcgagtaccagccttctaagaccggcaccccacagggaggcaatctctctcctcttcttagcaatataatgctcaacgagctggacaaagaactggagtccagggatctgaacttcgtgaggtacgccgatgattgtattataactgtaaagagtcaggctagtgctaaacgtgtgatggagtctattacatcttggattgaaagaaaactgggactgaaggttaacgcatccaagtctaaaattaccagacccaccaacctcaagtaccttgggttcggattttggaaagatggaagggcaaaccagtggaaagctcgcccccatcaggatagtatcaagagcttcaaagacaagcttaaaagcttgacgcaaaggaagtggagcatctcatttactgaacgcctgaaaaagctcaaccaagtaataaggggatggatcaactactttctgatcggatccatcaagggtgttctcacagagatcgactctcggcttaggacacgacttagaatgattatctggaaaatgtggaaagtcccctccaaaaggcagtgggggttgcagaagctgggcataaataaagatctcgctcggttgacctcatactgtggcgatcggtactactttgtagctacgaagacttgcgtctcacgggccatctccaaaaaaatactcacgcagagagggctggtatccccaatcgattactacgagcaccgccgcaacgtacggtttaacgatatctga

SEQ ID NO: 1709 - DNA, 1830 bp, synthetic construct
  source 1..1830: mol_type = other DNA; note = FH-MCP-MG153-66
atggactacaaagacgatgacgacaagtacccctatgatgtacctgattatgctgccagcaatttcacacagttcgtccttgtagacaacggcggcaccggggatgttacagtggccccgagcaatttcgcaaacggcgtagccgagtggatctcctctaatagcagaagccaggcttataaggttacatgctctgtaaggcagtcttccgcacaaaatagaaagtacacaatcaaggtcgaagtgcccaaggttgctacacagaccgttggtggagaggagttgccagtggctgggtggcgctcctacctgaatatggagttaacaatccccattttcgctaccaattcagactgtgaactcattgtcaaagctatgcaaggtcttcttaaggatggtaacccaattccaagtgcaattgctgctaattcaggcatttattctggcggcagcagcggcggctcaagcggaagtgaaacacctggaacttccgaaagcgctacgcctgaatcttctggtggatcttctggcggatcttccgcatgcgtcgacaaactgattgacctcattctggaggatgataatctgaacttggcttgcacccgagtaattcgggccaaaggcagaaacggtgttgacaagatgagtacgtctgacctgaagaactacctggaagagaaccgcgaactgatcaagagcagcataatcgatcgcaagtacaagccatcacctgtgctcagagtcgagatcccaaaagaggacgggtctatgcgtgcccttgggattccaactgttaaggacaggatgatccagcaggctatagctcaagttctgtctccaatctatgaagatatttttagcgacagctcattcggtttccgtcctaaacgaaatgctcacatggccattgaaaaggctctgaaccacatgaaccagggcaaggaatgggtcgtagacattgacctggaaaaattctttgataaggttaatcacgataaactgatgcagatcatcagcaataccattcacgatggagacgttattagtctgataaggaaattcctggttagcggcatcatcattgacgacgagtacaaagaggctgttatcggcacgcctcaggggggtaacctcagtccacttctgggcaatattatcctcaatgaactggactacgagctggagtctcgagggctgagtttcacccggtacgcagatgattgtcttattttcgtggggacagaaaaagccgctaatagagtgatgaaatccgtgactaaataccttcatgaggttctgaaactcaaagtgaacgttagtaaatctcaggtgcgaaaaccaggcgggctgaagttcttgggcttttccttcacaaaagacgcccggcacctctatgtagctagaccacacaaaatatccattaagaagttgcgcgaaaagataaaatatatcacttcaagatcctggagtataagcatcaaagagagactcactaggcttaaatacttgtatcggggatggttcaactattttaaatacgataaaatgaagagtctgtgtatacagattgatggatatactcgattccgtttacgtatatgtatttggaagcagtggaagactataagtaagaagtacaagtcactcaaacagctcgggattaacaaatacaaagcgtgggagtgggctaacagcagacttggatacgcccgggtagccatgagtttcatcatgacacggaccgtgacgaacgaggtcattaaaaaaaaaggttacctctccttggaaagcctccattcccagtatattttcaacctgaatgatatctga

SEQ ID NO: 1710 - DNA, 1845 bp, synthetic construct
  source 1..1845: mol_type = other DNA; note = FH-MCP-MG153-67
atggactacaaagacgatgacgacaagtacccctatgatgtacctgattatgctgccagcaatttcacacagttcgtccttgtagacaacggcggcaccggggatgttacagtggccccgagcaatttcgcaaacggcgtagccgagtggatctcctctaatagcagaagccaggcttataaggttacatgctctgtaaggcagtcttccgcacaaaatagaaagtacacaatcaaggtcgaagtgcccaaggttgctacacagaccgttggtggagaggagttgccagtggctgggtggcgctcctacctgaatatggagttaacaatccccattttcgctaccaattcagactgtgaactcattgtcaaagctatgcaaggtcttcttaaggatggtaacccaattccaagtgcaattgctgctaattcaggcatttattctggcggcagcagcggcggctcaagcggaagtgaaacacctggaacttccgaaagcgctacgcctgaatcttctggtggatcttctggcggatcttccgcatgcgtcgacgccacggagttgctggaaaggattctgtcagatgagaacctggaagaagcacgcaaaaaggtaatgtccaacaagggcgcctcaggaatcgatcacatgactgtaaaggagctgcctgagtatatagccggctcaggtacagagacatgcgaccggatccgggcccgcaagtggcgacctatgccggtaaggcgtgtccagatcccaaaggatgacggaaccaagcgggatttaggcgtgcctgccgttaaggatcggtggatcgagcaggctgcctgtcaagttctcactcctattttcgaaaaggaatttagcgagaactcatacggctttagacccggcagacgtgctgaacaggccgttctgaaggctatgggctacatgaatgatgggtacgattggatagtggacctcgacttgagtaaattcttcgacaatgtagaccaagacattcttatgatcctggtacacaacgtcatcaaagatccagacaccgagagcttgttgagacgatttctgcagagtggcgttatctgtgaaggaagttttcaggagacccgcaccggtacagcacagggttctccgatcagcccactgctggctaacgtgtacttgaacgagttcgacaaggaatttgaagcaagaggcctgagatttacaaggtacgctgatgactgcataatctgtgtcaaatccgaaatggcagccgatagggtgatggcgaaggtcaccgcgtggcttgaaaagcgcctgagagtcaaggtgaatgccactaagagcaaggtggccagacccgatgagatcaaatatctcgggcacagtttttaccataaagaagggaagtggcgacctaagccgcacataaaggccgttagaaaacttgaatacaatctcggtccattgctgaaacgtaattggggggtgagtatggattatcgcatcagcaagataaatgaagtcataagaggttgggtcaattactaccgacagtgcgacatgaagacaattttaaaaacaattgatagatgggttcgacttcacattaggattatatattggaagcagtggaagacagtcaggaaccgcgcaaatcatctctggaagctcggaatgaagaaatattggtgttggctgtacgccaacactaggtctggttactacgtcgcaggaaaatggttgagtcgctggataagtaataggctgctcaggaatgtgggattgctgtccatggaagagtactatttgcagaatcatccagtgtcagcccagcttatgctggtgctggatatctga

SEQ ID NO: 1711 - DNA, 1881 bp, synthetic construct
  source 1..1881: mol_type = other DNA; note = FH-MCP-MG153-68
atggactacaaagacgatgacgacaagtacccctatgatgtacctgattatgctgccagcaatttcacacagttcgtccttgtagacaacggcggcaccggggatgttacagtggccccgagcaatttcgcaaacggcgtagccgagtggatctcctctaatagcagaagccaggcttataaggttacatgctctgtaaggcagtcttccgcacaaaatagaaagtacacaatcaaggtcgaagtgcccaaggttgctacacagaccgttggtggagaggagttgccagtggctgggtggcgctcctacctgaatatggagttaacaatccccattttcgctaccaattcagactgtgaactcattgtcaaagctatgcaaggtcttcttaaggatggtaacccaattccaagtgcaattgctgctaattcaggcatttattctggcggcagcagcggcggctcaagcggaagtgaaacacctggaacttccgaaagcgctacgcctgaatcttctggtggatcttctggcggatcttccgcatgcgtcgacaaaaagtctagtaaggagattatcgtaaatgttgagatacgcaaagaaagaacatctatggaactgttggagaaagtcctctcagataacaacatcaaaaacgctattgaacgtgtcgtgtcaaataagggagcaagtggcatcgatgggatgaaggtcgaggaactgtattcatacttttatgaacacggagaagaattgaaggagcaaatacgcacgaggaagtacaagccttccccagttagaagagtctatatcccaaaagagaatggagataaaagatccctcggaatccccgtcgtggttgatcgagtaatacagcaggccatagttcaagtgctctccccgatttatgaaaagcaattctcagagaatagctacggatttagaccaggctgctcatgtgagatggccatactgaaactgctggagtactttaacgatggctacacatggatagtggatatagatctcgagaaattttttgacaatgtctgccatgataagctgattgctatcattatgaaaacaattcatgatggcgaattagtgagtctgataaggaaatatctggtgagtggcgtgatggaaaatggagtcgtcagccccacgaaggtcgggacccctcagggaggtaacctgtcccctcttctgtccaatatcatgttaaatgaactggacaaagagcttgaaaagcgcggcctcaggttcactagatatgctgacgattgcattatcgtcgtgaagagtgagaaagccgctaacagggtgatggagactatcaccagattcattgaaaaaaaactgggactcaaagttaacatgacaaagagtaaagtcgcccggcctgaccagatcaaatatcttggcttcggtttctatactaccaagaccggcatcattaagccaaaaccacacttgaagagcattcagaaattcaagcggaaactgaaacaacttaccaagaggtcatggtccattagtttaaagaatcgaatcattaagctcaatcaggtcatccgaggctggattaactattttagaattgccgacatgaagtcagatatgacgaacattggacaacatctgaggcgccgaatacgatgtataatttggaaacaatggaaagtgccaagaaaaagaatttgggcgatgcaaaaattgggggcggacatcgagcaggctaaagcaatagcctgcagcaggaaatcatactggaatagctccatgtttattggcatttatatcactaacaataagctgaagcagaagggactggtcttccctttagaccactacctgaaggtgcacactgtgatagatatctga

SEQ ID NO: 1712 - DNA, 1947 bp, synthetic construct
  source 1..1947: mol_type = other DNA; note = FH-MCP-MG153-69
atggactacaaagacgatgacgacaagtacccctatgatgtacctgattatgctgccagcaatttcacacagttcgtccttgtagacaacggcggcaccggggatgttacagtggccccgagcaatttcgcaaacggcgtagccgagtggatctcctctaatagcagaagccaggcttataaggttacatgctctgtaaggcagtcttccgcacaaaatagaaagtacacaatcaaggtcgaagtgcccaaggttgctacacagaccgttggtggagaggagttgccagtggctgggtggcgctcctacctgaatatggagttaacaatccccattttcgctaccaattcagactgtgaactcattgtcaaagctatgcaaggtcttcttaaggatggtaacccaattccaagtgcaattgctgctaattcaggcatttattctggcggcagcagcggcggctcaagcggaagtgaaacacctggaacttccgaaagcgctacgcctgaatcttctggtggatcttctggcggatcttccgcatgcgtcgacaaggaaggaaaacagaagacagagaagggatgccatgcagaggttcgcacggagtcccgagggatgcatggggttcagacaagcatgggcatcattgagaacaacctggtagaggttccagtcgttgaaggtgacctgctgactcatattatctccccaagtaacatgaacctggcttacaaaagggtagtttccaacgggggcagcggtggtatagacggcatggaagtgaaggagctccttccctatttgaggagtcacaaggatgaactggtaaagaaactcttggatggcaaatataggccaaatcctgtacggagggtggaaattcctaaggacaacggtaagaaaaggccgctgggtataccgaccgtggtggacagattggttcagcagtccatcgcccaggtgctgcaaccactgtatgagcctcaattttccccctacagtttcggcttccgcccacacaggggtgcccaccaggctttattgtgtgcacagagcatcattaacgatggaaacagattctgcattgatttggatttggaacaattttttgataatgtgaatcatagcaaactcattgaagtgatttcccgaatgattaacgacggccgggtggtgtcccttattcacaaataccttaacgccggggtcttggttgccggaaaatacgaggagacgcggaaaggcgttccacagggagggcctctgtcccctctgctgtccaatatcatgctgaacgagctcgataaaaaattgaccaaacgaggccacccttttgtccgttacgcagatgactgtatgatcttctgccgatcagagagagctgcagaaagaatcctggagagtatatccaaatttatagatgttaagttgttccttaaggtgaaccgagataagacgggtacagggagcgtctgcggaaagaaattcttgggctattccttctactttgataaagatggcaaatgccagttaagactgcatcccaaaaccatcgacaaactgaaggccacactcaaaaagctgactgggagaagcaacggcatggggtataaccagaggaaggaagcgctgcacctgttcattcgcgggtgggtcgagtactataaactggcacggatgaagaagaccctggaaaccatcgacaaatggctgcgacggcgcatacgcatgtgtatctggaagagttggaagaacccccgaactaggattgcgaatctgattaaatgtggggtcccaaagtggcaggcctataagcacggctgggtcaagggctactggagggcctcttgtatgcctgactgtacccacgccatgagtggtcataatctctaccgagcagggtatcggtttcttatggactattacgtgcttgtctccgatatctga

SEQ ID NO: 1713 - DNA, 1848 bp, synthetic construct
  source 1..1848: mol_type = other DNA; note = FH-MCP-MG153-70
atggactacaaagacgatgacgacaagtacccctatgatgtacctgattatgctgccagcaatttcacacagttcgtccttgtagacaacggcggcaccggggatgttacagtggccccgagcaatttcgcaaacggcgtagccgagtggatctcctctaatagcagaagccaggcttataaggttacatgctctgtaaggcagtcttccgcacaaaatagaaagtacacaatcaaggtcgaagtgcccaaggttgctacacagaccgttggtggagaggagttgccagtggctgggtggcgctcctacctgaatatggagttaacaatccccattttcgctaccaattcagactgtgaactcattgtcaaagctatgcaaggtcttcttaaggatggtaacccaattccaagtgcaattgctgctaattcaggcatttattctggcggcagcagcggcggctcaagcggaagtgaaacacctggaacttccgaaagcgctacgcctgaatcttctggtggatcttctggcggatcttccgcatgcgtcgacactcattacctttacatgcctatggtggctatgacaactgtggacagctatttcaatagagagtctgtgctgaaccaagcaaagaaggtgaaaagaaaacggtcacatggaatagacggcataagcgcgaaagaagcattgaagatcgccgagaaggaatattcatctatcaaaaccgaggttctgaatggaacttaccaacccgactacattctgaaggtgaacatacccaagggaaatggaaaggtgcgaacaatcggcaatgctaacactcgagacagaattgtgcagggctgcattcataactatttatatgacgtcttggactcagaactgagcaatgataattttggatttagaaataaccacaattgccagatggcagtgcttagagtagttgacattattcaagaaggctacgagtggatcattagtatcgacctgatggattgctttactaatctgaataaacatcttatcttgtggttactgcacaatgtgaacgttgacaatagaattatcaacagtatcaataacatcatatccaacaagtatattaacggggacataattgaacccgtaaagggatgcccacagggctccaatatttcacccgatctgtgcaacatggtgctgaaccagctcgacaaaatgcttgaggaaaggggccacccctttgtgaggtacgccgacgacatttacgtattctgtaggtcacagaaggctgcacagcgagtgctgaaatctgtaaagaggtttctggaaaagaaattgaaactgattatcaatgaagaaaagacgcagttattccactgtaaagaaaaagtgtggtcatgtcttggctttctgataaagcaggatgtggacatccacatctacatgaatcccaagaaggaggaaaaactgaggatgaacattaaaggtttgatgcacaacgccatgcccaatgagatgattcagcgaatcaactctttgacgtgtgggtggatatgctgtaactacattgccgacatgggccgtgcaacgaagcgtatggacgcttatattaagcggtccataagaggatatgagcgcaggcacgatgtgaaagtagatacaacgaagcttaaaagctgtcacggctactataaaaggatgcttcagcaagttcagtcaaaggaaaaagagtccgaatctgtgggcaataccaatcagaagcagagcaataaccagccacgtaacgtcgatgagcacgacacagaagtgtctctttcagtgcgcgcacctcctaaatctgattctcacaaagatatctga

SEQ ID NO: 1714 - DNA, 1974 bp, synthetic construct
  source 1..1974: mol_type = other DNA; note = FH-MCP-MG153-71
atggactacaaagacgatgacgacaagtacccctatgatgtacctgattatgctgccagcaatttcacacagttcgtccttgtagacaacggcggcaccggggatgttacagtggccccgagcaatttcgcaaacggcgtagccgagtggatctcctctaatagcagaagccaggcttataaggttacatgctctgtaaggcagtcttccgcacaaaatagaaagtacacaatcaaggtcgaagtgcccaaggttgctacacagaccgttggtggagaggagttgccagtggctgggtggcgctcctacctgaatatggagttaacaatccccattttcgctaccaattcagactgtgaactcattgtcaaagctatgcaaggtcttcttaaggatggtaacccaattccaagtgcaattgctgctaattcaggcatttattctggcggcagcagcggcggctcaagcggaagtgaaacacctggaacttccgaaagcgctacgcctgaatcttctggtggatcttctggcggatcttccgcatgcgtcgacaatgtaactaaggatggctttaagaataggcaacttcatatcgaggattaccttcagatggtgagtgctgaacagaaagagtatgcggaggttttcgctcaccagcgcattgctgaaaacaacgacatcattacagattttcagacagacagtctgatggaaaaaatcttgcataaagacaaccttaacaaagcctataagaaggtgaagtccaacaagggcgccggtggggtcgatggcatgtctgtcgatgagttattatactttctgcgggataatcaggaacaactgattcagagaattaaaaatgggaaatacaagccaaatcctgtaagacgcgtagaaatccctaaggagaccaaaggagagtttcgaaagctcggggttcccacagtggttgatcgtgtttttcagcaggctatcacgcaggtgctctcccccatctacgaaaagcagttttccgagaacagttttggctttagacccacacggagcgctcatgatgccctcaaacagtgtcaaaccaacgtcaatgatggatatgtctacgtcgttgatatggatctggagaagttcttcgatactgtctgccagtctaaactgatagaggttttgtccagaacaatcaaggacggacaggtgatttccttgatacataagtacttgaatgccggggtgatttcaagaggaatgttcgagaaaacagaggtgggaatgccacaaggaggccccctgagccctctgctctcaaatatcatgcttaatgagctggacaaggaattgacacgaagaggacatagattcgtgcggtacgctgacgactgtatgattttttgcaagtccaaaaagagtgctgaacgcaccctggagaatatcgtgccgtacattgaaggaaaactgtttctcaaggtgaatcgcactaagacctgtgttgcgcacatatctaaagtgaaatatctggggtactctttttatcggtataaggggaaatgccggttcaggatccatcccaaatcagtcgaaaagatgaaaaataagatacgtgaacttacagatagacacaatggctggggcaacgaatatagagctctgaaactgactcaatttataagaggttgggtgaattactttggaaaggcggacatgaaacgactgctgcaggatagcgacgagtggttgagacacagaataagggcagtgtactggaaacagtggaagaagaccaagacaaagtaccggaaactgaaagagctgggcatggatgagaagttcatacagtggcacgcgaatatgaggcagggaatttggaattgcagtaacaatcgaatggtgcagtttgctctcaataacacaaaattacgtgagtggggataccccaccttcactgaattttatttgaagatctgtgaaaacgatatctga

SEQ ID NO: 1715 - DNA, 1980 bp, synthetic construct
  source 1..1980: mol_type = other DNA; note = FH-MCP-MG153-72
atggactacaaagacgatgacgacaagtacccctatgatgtacctgattatgctgccagcaatttcacacagttcgtccttgtagacaacggcggcaccggggatgttacagtggccccgagcaatttcgcaaacggcgtagccgagtggatctcctctaatagcagaagccaggcttataaggttacatgctctgtaaggcagtcttccgcacaaaatagaaagtacacaatcaaggtcgaagtgcccaaggttgctacacagaccgttggtggagaggagttgccagtggctgggtggcgctcctacctgaatatggagttaacaatccccattttcgctaccaattcagactgtgaactcattgtcaaagctatgcaaggtcttcttaaggatggtaacccaattccaagtgcaattgctgctaattcaggcatttattctggcggcagcagcggcggctcaagcggaagtgaaacacctggaacttccgaaagcgctacgcctgaatcttctggtggatcttctggcggatcttccgcatgcgtcgacaaggatcaaaccaacgaagaatcactcgatcccgtcccaggagagttgccagacaccgcaggccgtcctggcgcagcttccgcccagcatgtggaaaagaacggggctgccccagtggatagtgacgcattgtttcgtcaggttttagacggggccaacctcaaccttgcatggaagcaggttaaagccaacaaaggggctcctggggtggatggaatgaccattgatgaatttcctgccttcgcacgcgagaactgggagcgcattcggagccaattgagcgaagggacctaccacccagctgcagtgcgtcgcgtcttcataccgaagcccgacggtagtcagcgacctctgggcgtgccaacagtcctggaccgggtgatccagcaggccatagcccaggtccttactccattatacgatggcagctttagcaatcactgctatgggttcagatcagggcggaatgctcatcaggctgtccaagaaatggaagtggcatggaagcaaaaacggcattatgcagtagactgtgacctgaaagctttctttgataccgtgaatcatgaccggttaatggaacaacttaggaggaagatcggcggtggaaaactgctcaggttaattggtcggtaccttcgtgctggagttgaactgcctgatgggtctcgtgaagatacacccctcggggttccccaagggggacccctttcaccattactggcaaacattgtgctggaccccctggacaaggaactggagcgccgaggccactcattcgcacgatacgccgacgattttctgatatttgttaagtccgcaaaagccgcggaacgggtaatgggtagtgtgatgaactatgttgagaagagacttgggctgactgtgaatagaaccaagtccaagtgcgggaagctgacagattgcacttttttgggattccagatctccgcccgcggaaaggtgaaatggagcgccaaggcctttctccggttcaaacagcgcgtgagagaaattaccaagcggaaccgggggcaaaacgtgcaatcagtcatcgacgaactgcgcaggtacgcagcaggctggatgaactactttggaatatcccacacctatgccgaagtaatggatctggacgaatggatcagacgcagagtgagactgtaccactggaaacagtggcagaggcctagagcaagaagaagaaatctcattagacttggcatttcccctggcgaggtccaccgcgcatctcgttcaagaaaaggctactggcgtatgtctcaaaattcactcgtgtgtttcgcacttaataatcgttatctgaaggagcgaggagttcctgaactcagggatatatggatcagactgcattatggagaccagccaaagccaaaaggtactggaaaattggttacagatatctga

SEQ ID NO: 1716 - DNA, 1947 bp, synthetic construct
  source 1..1947: mol_type = other DNA; note = FH-MCP-MG153-73
atggactacaaagacgatgacgacaagtacccctatgatgtacctgattatgctgccagcaatttcacacagttcgtccttgtagacaacggcggcaccggggatgttacagtggccccgagcaatttcgcaaacggcgtagccgagtggatctcctctaatagcagaagccaggcttataaggttacatgctctgtaaggcagtcttccgcacaaaatagaaagtacacaatcaaggtcgaagtgcccaaggttgctacacagaccgttggtggagaggagttgccagtggctgggtggcgctcctacctgaatatggagttaacaatccccattttcgctaccaattcagactgtgaactcattgtcaaagctatgcaaggtcttcttaaggatggtaacccaattccaagtgcaattgctgctaattcaggcatttattctggcggcagcagcggcggctcaagcggaagtgaaacacctggaacttccgaaagcgctacgcctgaatcttctggtggatcttctggcggatcttccgcatgcgtcgacaaagctgaatattccaagaataggagttgtccccagcgcaacagcgcagaacatgaagcgtacgtgggtgctcagtcagtaggcaatagggaggtgggtgagcagggcggcgccgatctcctcgaaaggattctgagccgggataatctgaatagagcatacaaacaggttagagctaataaaggggcccccgggattgatggtatgaccattgaggacgcgctgccatggttgagagagcatagggaggaattacttgagagtattcggcaggggaaatacaaaccacagcctgtgagacgtaaggaaattcctaaacctgatgggggagtcaggaagttaggcatcccaacagttatcgaccgaattatccaacaggctattgcccagcagctggtgcccatttatgaaccgttgttctctgacgacagttatggctacaggcctgggagaagtgggcagcaggctatacgcaaggtgaagtggtacgccgaacagggatataccagtgcagtgctggtggatctcagcaagtattttgacactctgaaccatgaactgctgatgaatctcctcagaaagaacatccacgataaacgcgtgatcgaactgatcaaaaggtacttaaaagccggggttatggagaatggtctcctggtcaaaactgctgaagggagtccgcagggaggacccctgagtccactgctggctaacatctacctgaatgaatacgacagggagatggcctctcgcggggtacccgttattagatatgctgacgacattgtcgttttagcaaaatcccccagagccgcgcagcgtctgctcgagagcacacaacgttatcttgaaggaaaattaaaattgaagatgaatgtggagaaatccaaggtggtctcagtctacagtatacgaaacttcaagtttctgggctttgctctggggaagggcaaaaatggcgtgtacatccgcgtgcacaccaagaccctgaagaaagccaaggcaaagcttaaggaactcacatcaaggtcacagggtcggaacgtgaggaaggttatggagaacgtgaaggtgtatatcagagggtggctggggtacttcgggatagcaagtatgaaaacaactatgcaggagtgggacggctggctcagacgccgcttccgcatgtacatttggaagcagtggaagaaaccgcgcacacgggtgaagaatctgatgatcttaggtatgcctgagtggcaggcccataggaacggtaatactaggaaaggatactgggcagtggccggcagcggtatcctgacacacaccattaccaataaaagactggcccaggctggctattactccattttggaccgttacgaatccctgcacagttgtgatgatatctga

SEQ ID NO: 1717 - DNA, 1818 bp, synthetic construct
  source 1..1818: mol_type = other DNA; note = FH-MCP-MG153-74
atggactacaaagacgatgacgacaagtacccctatgatgtacctgattatgctgccagcaatttcacacagttcgtccttgtagacaacggcggcaccggggatgttacagtggccccgagcaatttcgcaaacggcgtagccgagtggatctcctctaatagcagaagccaggcttataaggttacatgctctgtaaggcagtcttccgcacaaaatagaaagtacacaatcaaggtcgaagtgcccaaggttgctacacagaccgttggtggagaggagttgccagtggctgggtggcgctcctacctgaatatggagttaacaatccccattttcgctaccaattcagactgtgaactcattgtcaaagctatgcaaggtcttcttaaggatggtaacccaattccaagtgcaattgctgctaattcaggcatttattctggcggcagcagcggcggctcaagcggaagtgaaacacctggaacttccgaaagcgctacgcctgaatcttctggtggatcttctggcggatcttccgcatgcgtcgacaagctgatggatgaggttctgagcaaagataatctgaatcaggcctacttgcaggtgactagaaataaaggtgcatctggcgtggatgacatgacttgcgaggaggtcaaggactacctcaaggttcatggagatgaacttattagtcagattaaaagccgcgagtataagcctctcccagttagacgtgtcgaaattcctaagccaaatgggggagtccgaaaattagggattcctactgtgatagacagaataatacaacaggcccttgtgcagaagctgacccccatctttgagccaacttttagcgaatacagctacggatttagaccgaacaggaggtgtcagaacgcaattgacaaggctttggaacttctcaaccagggctacgaatggattatcgatcttgaccttgaaaagttttttgacaacgtgccccaggataaacttattcgcctggtggataacatggtgaatgactcagacatcacagcacttattcacaagtatctgaaggctggagttctgatcaacggtgagttcgaggagacaactatcggcactcctcaagggggcaacttaagcccgctgctgagtaacatatatctgaacgaactcgacaaggagctggagcggagaggtctgcatttcgcccgatatgccgacgactgcgtcatctttgtcaaaacggagaatgctgccaagagagttatgtttcacattgtgaagttcatcgagactaaactgaagttaaaagtcaatgcggagaagactcacatcactcggcctaacaatctgaagtatctgggattctctttttggaaggataaagaagagtggaaaagtaagccacacaaggaatccttcgtgaagctgttccttaagttaaaaaagctggtgaaaaggagttggagcatcgaccttgattacaggattaagaaaattaacgaagtcctgagagggtggattaattattatagacagagctccatgaagcgaaagctggtgaaaattagtggctggctccgcaacgctgtccgtgtgatcatttggaagcagtggaaactcccatgcgcaagacggaaagctctcataaaattgggactgagcgaaaatgaagccaaatgcgtctctaatagtcgcaagggctatcaacatatttgccactgctggagcattacaaaagccattagcaactctaggttgaaaaagagagggttactggatcctttggagtactacctgaaacctatagctgatatctga

SEQ ID NO: 1718 - DNA, 1980 bp, synthetic construct
  source 1..1980: mol_type = other DNA; note = FH-MCP-MG153-75
atggactacaaagacgatgacgacaagtacccctatgatgtacctgattatgctgccagcaatttcacacagttcgtccttgtagacaacggcggcaccggggatgttacagtggccccgagcaatttcgcaaacggcgtagccgagtggatctcctctaatagcagaagccaggcttataaggttacatgctctgtaaggcagtcttccgcacaaaatagaaagtacacaatcaaggtcgaagtgcccaaggttgctacacagaccgttggtggagaggagttgccagtggctgggtggcgctcctacctgaatatggagttaacaatccccattttcgctaccaattcagactgtgaactcattgtcaaagctatgcaaggtcttcttaaggatggtaacccaattccaagtgcaattgctgctaattcaggcatttattctggcggcagcagcggcggctcaagcggaagtgaaacacctggaacttccgaaagcgctacgcctgaatcttctggtggatcttctggcggatcttccgcatgcgtcgacatcaccgaaaacctcagaatgggctgcccacagatggactctaccgagtgcgaggagtatgccgaggctttgtcaatttatttgcccgaggacattgagcgggaaacgagattaaacaccgagcacctcatggaagaggtaatttcaattccgaatatgatacgcgctatgaagcgcgtgaaacggaataaaggggctgctggagttgacgggatggaaattcctgaggctatggattggctccaagcacacttcgctgaagtacaggaagagctggctggaggatactaccacccatcctctgtacgacgtcgggtcatccccaaaccggatggaggagaacgcaaacttggtattccaacagtgaaagatagggtagtacagcaggctattgctcaaatacttgtgcctttatacgaaccacagttcgccgaaaactcatacgggtaccgacctggcagaagcggacagcaagcgattatgaaagtcaaagaatatgccgaggaggggtacgtgtgggctgtcgttctcgacttgtccaaatattttgacacacttaatcatgaccgactgatcagagagttgagacgaacgatcaaggatgagaaagtgatgattgctatcaaaaagttcctgaaggctggggtgatggaaaatggagtggtaatcgaaacacgagagggaagtccccaaggcggaaatctctccccactgcttgctaatgtgtacctgaatgagtttgactgcacctacgcagagagaggagtgcccgagatccgttacgccgacgacattgtccttctggccaagtctcagagggctgccgaaagaatattggccgggtcaatcgccatgctcgaaggaaaactgcacctgaaggtcaacagagataagtcaagaatcgtcaacctggctaataacaaaggacaatttaagtacctgggttttggcatgtataagggtcgggatggtttcaagattgtacctcacgtcaaatcccgaaaaaaattcaaaaagaagctgaaagcaatgaccaaccggaaacgagctgggaaattcgaggacatctgtatggagctgaagagagttatcaacggctggatgaactattacgggatcgctgaaatgaaaacctgggcgaaggaaatggacggttggctgcgtacaaggatgcggatgataatttggaagaggtggaaaaatccaagaaccaagtaccgcaagttaaagggcctgggcattcctcctgagtacgcttacatggccgctaacacacgcaagggtccagctcgcgctgtgcgcttgactactgtcctgagagctctgtccaatcgtaagttggaagcttgggggtacccgtcaataagtaggtcatttgaacacaagcatcagagcgtggtgcagctccgtttcgctttcgatatctga

SEQ ID NO: 1719 - DNA, 1836 bp, synthetic construct
  source 1..1836: mol_type = other DNA; note = FH-MCP-MG153-76
atggactacaaagacgatgacgacaagtacccctatgatgtacctgattatgctgccagcaatttcacacagttcgtccttgtagacaacggcggcaccggggatgttacagtggccccgagcaatttcgcaaacggcgtagccgagtggatctcctctaatagcagaagccaggcttataaggttacatgctctgtaaggcagtcttccgcacaaaatagaaagtacacaatcaaggtcgaagtgcccaaggttgctacacagaccgttggtggagaggagttgccagtggctgggtggcgctcctacctgaatatggagttaacaatccccattttcgctaccaattcagactgtgaactcattgtcaaagctatgcaaggtcttcttaaggatggtaacccaattccaagtgcaattgctgctaattcaggcatttattctggcggcagcagcggcggctcaagcggaagtgaaacacctggaacttccgaaagcgctacgcctgaatcttctggtggatcttctggcggatcttccgcatgcgtcgaccctgaggacaaaccgcgagaagcaacccttgagactgtattggctgcagccaatttgtgggcagcatggcgggccgttaaggcaaacggtggcgctcccggcgtggaccagatggatatggagagatccgcgaggcacctgcgcgcgcactgggaagcaatccgatcaaaattgctggccggagcctatgtgccaggcgccgttagagtagtgtctatcccaaaggcaaacggtggagagaggcagctcggcattcccaacattactgaccgcgtgatacaacaggcgattcatcaagtcctgtcacccgtctgggagcctgtcttttcagcacactcacatggcttccgtccgggaaggagcgcccatgatgccgtgaaggctgcgcaggcatttgtaaaggccggcaaaacatgggtcgtggatattgatctgaagtctttctttgacaggatcgatcacgacaagctcatgcacctgctgaggggacgtattgaagaccaacgcttacgagcattaatcggagcgtatctcagggcccctatgcagcatagagacggcagaaaagagaaacgttggaaaggggccccacaggggggaccgctctctccgcttctggctaatattgccctcgaccccttagataaggagctcgagaagcgcggcgtgtcttttgtgcgctatgcagatgacatagctatttttgcaagttcagcccgcagtgcagaaagaatctacgcctccgtggtcgcctggatagaaagacaccttaagcttgaagttaatcgtgagaagtccggaaccgggccgtccggaaaatcctccctgcttggtttcagagtgcatgaggatggaaacgtggaggtatcccctaaagcaatagcaaagctcaaagaaaaggtccgggaacattgggatgcaagacaatcactgacttcagaacggctgagggcgcagtggcaagattatatccgtggatggtggaattacttccaactggcgaactggaggcgcgaggtggtccgactgagtggatggattaggcgacacatgcggaagtgcttttggttgaggtggaaaacacccagaggacgcgtgaatgcgttgaaaaagctgggggtgacagggagagcacttgggcagggtagtagtactaggggcgcctggccaatggctcttcaccccactgtccagcaggccctgtccaaccgggccctcgctaggtacggctttatcataccatggcaggtcgcagctgcacctggcacaggcagagatatctga

SEQ ID NO: 1720 - DNA, 2022 bp, synthetic construct
  source 1..2022: mol_type = other DNA; note = FH-MCP-MG153-77
atggactacaaagacgatgacgacaagtacccctatgatgtacctgattatgctgccagcaatttcacacagttcgtccttgtagacaacggcggcaccggggatgttacagtggccccgagcaatttcgcaaacggcgtagccgagtggatctcctctaatagcagaagccaggcttataaggttacatgctctgtaaggcagtcttccgcacaaaatagaaagtacacaatcaaggtcgaagtgcccaaggttgctacacagaccgttggtggagaggagttgccagtggctgggtggcgctcctacctgaatatggagttaacaatccccattttcgctaccaattcagactgtgaactcattgtcaaagctatgcaaggtcttcttaaggatggtaacccaattccaagtgcaattgctgctaattcaggcatttattctggcggcagcagcggcggctcaagcggaagtgaaacacctggaacttccgaaagcgctacgcctgaatcttctggtggatcttctggcggatcttccgcatgcgtcgacagtaacagcaacctcatcgtggagacttcaaattgcaaagatactaaggacatcagtgacaagtccaatacccctacgtacgatcacgtgaccctggagaacatcctgtctcacggaaacctgaccttggctcggattagcgttgagataaataaaggtgcacccggtatcgacaaaatgactaccgacacactgaggcgttatcttgagatctatggcgatgagctcgaaaaacagattcggactggtaagtacaagcccttggcgataaaaagagtgtacatccctaaggagaacggacaaaagagaccactcggcattccgaccgtgattgacagatatgtgcagcaggctgtcactcaggttcttagtgaggcctatgagccccatttcagcgactcctcctacggctacagaccaggaaggtctgcccgtcaagctgtgaagcagcttacacagtatgtaaactgtggatatacacatgtgatagacctggatttatccaaattttttgacaccgtgaatcatagtaagctcctgcagatcctcagtagcaaaattaaagacggtagagttatctcactgatacataaattcctcaaggcacctgttcaagaagatggtcaaatcggtcctaataccagaattgggactcctcaggggggctgcatatctccgattctcgcaaatatcttactgaatgagctcgaccagctcctcgatagacggggtatcaagttcctgaggtacgcggatgacatgtgcatctttgcaaagagcgagcgggctgccaagcgtatcctggataatgtcactcggtttatcgaaaaaaaattgtttctcaaagtgaatcaggacaagacgaaaatttgcgaggtggggcctgaagtacaatttctcggatttagtttaaagagggtgtacaaaaattttaaaaagggcattgtgccggagaagtgtaaatggtacccctcagtctcccagaagaagctggataagttcaagcaaaaagtgaaggagttattggatagaaaagcccccggcggggttctcaacactatgaaccggtataatcgttttatccgcgggtggcataattactaccgaggcgctttgggtcagtattggctgcaacgcacgtgcatgttgattcgaagaagaatacgtcagttatattggaagcagtggaagaccgcccagaaccggtttaaaaatgcacgcgagcggtggtccaaagctcccgaaattggcgacaaatcaaaaagagccattccatactcctcatctaggtattggagaatgtctaagtcctacgccttgaacaagatcctgggtaataagcagattgaggcagaaggatggctgtcacttgagacgatggataaaatgcactgggacaaactggcttcagaaaagtgcaatgggactgctgtcgatgccaggccggctaggcctgtggtggatatctga

SEQ ID NO: 1721 - DNA, 1887 bp, synthetic construct
  source 1..1887: mol_type = other DNA; note = FH-MCP-MG153-78
atggactacaaagacgatgacgacaagtacccctatgatgtacctgattatgctgccagcaatttcacacagttcgtccttgtagacaacggcggcaccggggatgttacagtggccccgagcaatttcgcaaacggcgtagccgagtggatctcctctaatagcagaagccaggcttataaggttacatgctctgtaaggcagtcttccgcacaaaatagaaagtacacaatcaaggtcgaagtgcccaaggttgctacacagaccgttggtggagaggagttgccagtggctgggtggcgctcctacctgaatatggagttaacaatccccattttcgctaccaattcagactgtgaactcattgtcaaagctatgcaaggtcttcttaaggatggtaacccaattccaagtgcaattgctgctaattcaggcatttattctggcggcagcagcggcggctcaagcggaagtgaaacacctggaacttccgaaagcgctacgcctgaatcttctggtggatcttctggcggatcttccgcatgcgtcgacaagacctccgttgaggggcagcctccagaggtcccagccagagacaaacaagggggggaaatccgcgcgcgctgggcatgggtagagccccaggtgtggactgagcggatgcttacagctctcgagactggtgttaagggaaatcagtggttttcattaatggacaaagtatacaggctcgatacgcttggcatcggatgggaacaggttcaggccaatgcgggcgggtccggtgtggacggcattaccgtcgagcgattcgcaaaggattgtcctagagggctcctggtcctgaatgaacaacttcgccagggatcctatagacctcatcctgtgaagaggtgctggataccaaaactgggcacaaagcagacccgacctttaggcattcccactgtgagggataggattgtgcaatccgccctgaggttagtgatagagcctatcttcgaaagggactttgcagagcaaagctacggattcagacctggcaggggctgcaaggatgcacttcgtcgggtgcagcagttattggacgaaggctgcacttggattgtggacgccgacctgaagaggtacttcgacactataccccatgagggactcatggccaaggttggcgagcggattgccgacggtagggtcttggatctgattaagtcctatctgaaacagggggtcctggacggactgagcgcttatgaagcgggcgaagaaggtactccacagggtgccgtcatgagtcccttgctggcaaatatttacctcaaccccttagaccagcagatggtgaggcagggatatgagatggtccgttacgctgatgattttgtaatcctgtgtaggagcgaagaggccgctcaggctgccttaagagaggtgcaagcctgggtgcaggcaaatggactgacactgcatccagagaaaacccgacttgtcgatatgatgcaacccggcggtttcgactttttagggtaccattttgaacgagggcacagatggcccaggaagaaatccctgatgaagctcaaggatactataagggcgctgacccctcgaacaagtggccagtctctggacagcagtatcaaaaagctgaaccagaccctgagagggtggtacggatactttaagcatggacatcgttctcgatttgagaggatcgaccagtatacacgtggacgcttgagggccatcttacgtagacgcagtaggaggagggggcgaagccggggccacgatcaccagaagtggtctattcattatttcaccgccgccggccttttcagtttggtgcaggccgatctggctacacgtcggagccccgatatctga

SEQ ID NO: 1722 - DNA, 1959 bp, synthetic construct
  source 1..1959: mol_type = other DNA; note = FH-MCP-MG153-79
atggactacaaagacgatgacgacaagtacccctatgatgtacctgattatgctgccagcaatttcacacagttcgtccttgtagacaacggcggcaccggggatgttacagtggccccgagcaatttcgcaaacggcgtagccgagtggatctcctctaatagcagaagccaggcttataaggttacatgctctgtaaggcagtcttccgcacaaaatagaaagtacacaatcaaggtcgaagtgcccaaggttgctacacagaccgttggtggagaggagttgccagtggctgggtggcgctcctacctgaatatggagttaacaatccccattttcgctaccaattcagactgtgaactcattgtcaaagctatgcaaggtcttcttaaggatggtaacccaattccaagtgcaattgctgctaattcaggcatttattctggcggcagcagcggcggctcaagcggaagtgaaacacctggaacttccgaaagcgctacgcctgaatcttctggtggatcttctggcggatcttccgcatgcgtcgaccaaaatacagggcacaggtccgggtccggatgtcctccggaggaccgcatggaagctgaaggcctcccaggggcacaatctgctgacaaagcaaaagaggaggaacgtgggggtgccggtaatagtctcatcgtgcaagtagccagaaagagctctctgcttgccgcatacaagaaagtgcgggctaatcggggcgcccccggcattgatggcatgacagtggacgccgcacggggatacttgaatgaacattggcgggagatcgcagagagcctcataaacggcacgtacaaacctcagccagtgcgacgagtaaatatacctaaacccgatggcggtacacgcgcgctggggataccatgtgtggtggacagggtggtggcgcagagccttgcacaagcccttgagcccatatttgagcccggatttagcgactcctcatatggattccggcctggtcgatctgcgcatcaggccatctctaaggccaaggagtatgtccaggagggctacacccgagttgttgacatcgacttggccaagtatttcgataccataaatcacgacatcttgatggatatggtcatggataaagtgaaggatcgaaaggctattaagctgattcgggccttcctgaaaggaggcgccatggagggtggacttctgagcgaaactgacgagggaagcccacaggggtcaccgctttcaccgatcctgagcaacgtctatcttaccaggttcgaccaatggttagaagcccgaggtcacagattcgttaggtacgccgatgattgtaatatctacctgaagagtcagcgggcagctgaacgcgtgatggcaaacagtgtggaatttttggagggaaagcgaatgaagcttacagttaatcgcgagaaaagccagatcggttcacctttccgcctgaagttcctcggattttccatgtaccggctgaatgggaaggcagcaattaggatccatgctaaaacaatcaatcgactgaagcagaagattcgtgcaattacaaagcgcaacagagggagatccttcgatgcaatcgctgctgaacttaaacaatatacagacggttggctcaactactatggaatagctgattcccgatccgtaatcggcatgatcaacaagtggatcaggcggagactgcgaatgtatatctggaagcagtggaaaactgtgaaaaagaggcacaagagtctcctggccctcggagcaactaagcaggaggcttggaagtgggccaataccagtaagagctattggcgtacgtctggatctcagatccttcaaaccacgataacaaacgagatactcgaacggagaggatactccgatatgctgaaaaagtatgactcagtgcacttaaaatttagaaccgctgatatctga

SEQ ID NO: 1723 - DNA, 1968 bp, synthetic construct
  source 1..1968: mol_type = other DNA; note = FH-MCP-MG153-80
atggactacaaagacgatgacgacaagtacccctatgatgtacctgattatgctgccagcaatttcacacagttcgtccttgtagacaacggcggcaccggggatgttacagtggccccgagcaatttcgcaaacggcgtagccgagtggatctcctctaatagcagaagccaggcttataaggttacatgctctgtaaggcagtcttccgcacaaaatagaaagtacacaatcaaggtcgaagtgcccaaggttgctacacagaccgttggtggagaggagttgccagtggctgggtggcgctcctacctgaatatggagttaacaatccccattttcgctaccaattcagactgtgaactcattgtcaaagctatgcaaggtcttcttaaggatggtaacccaattccaagtgcaattgctgctaattcaggcatttattctggcggcagcagcggcggctcaagcggaagtgaaacacctggaacttccgaaagcgctacgcctgaatcttctggtggatcttctggcggatcttccgcatgcgtcgacaatgtgaccaagacaggagctaaatgtagtcagctgcgcaaggaaggctcaacccaaaaagacagcgccgaacatgaggggtacgccggcgtacacatcccggaaaggatcacagaaacagatgaagcaaatacaagcaagagcatggagaagttacttgagaaaatcgtaagtcgggacaacttaaatgaggctttcaaaagggttaaagccaataagggttcccacgggtacgatggaatgggcgtggacgaattgctgcactacctgaaggaaaacggtgagaccatcaaacaacaaattttggacggtaaatatagacccaacccagttagacgggtggaaataccgaaggagaacggtaagaaacgtaatttgggcatcccaacagtagtcgatcgctttgttcaacaggctattgcacaagtactgacaccaatttatgagaaacaattttctgaaaacagctacgggttcagacccaaaaggaaggcccacgacgctatacgtaaatcccaagaaaatattgacggcggttacaggttcgtagtggatatggatctggaaaaatattttgatacggttaaccagtctaagttgatagaagttttgtcacgcactatcaaagacggcagggtcctctctcttattcacaagtttctgaaagccggagtagtcgtaaaacacaaatttgaagaaacggaactcggagttccgcagggcggaaacctttctcctattttgagcaatataatgctgaatgagctggacaaggagctgcagaagcgtggtcaccggttcgttcgctatgctgacgacatgttgattttttgtaagtcccgcaggtccgctgaacgtaccctcgcaaacatactgccattcatcgagcagaaattgtttttgaaggtgaaccgagagaaaactgtcgtggacgatgcccgcaaagtaaaattccttggattcagcttttactctcggaagggccagacaaaggtgcgcattcaccccaaatcaattgctaagatgaaagccaaagtgaaggaactgaccagccggtcaaacggaatgggcaatgaggaaagggtgatgaaattaaagcgctacataaccgggtggataaattatttcaaaattgccgacatgaagaaactgctgcagacaactgacgagtggatgagaagacggatcaggatgatattctggaagcagtggaaacgcgtgagaactcggttcgaccgacttaaaagcctcgggattcatgagcagaaagcatgggagtacgccaacacacgcaaatcctactggcgtacatctaagtctcctatcctcagcaaatctttaaataacacaactataaagggtctgggttttctctttttctcagattattataggcaggtgaatgttgatatctga

SEQ ID NO: 1724 - DNA, 1881 bp, synthetic construct
  source 1..1881: mol_type = other DNA; note = FH-MCP-MG153-81
atggactacaaagacgatgacgacaagtacccctatgatgtacctgattatgctgccagcaatttcacacagttcgtccttgtagacaacggcggcaccggggatgttacagtggccccgagcaatttcgcaaacggcgtagccgagtggatctcctctaatagcagaagccaggcttataaggttacatgctctgtaaggcagtcttccgcacaaaatagaaagtacacaatcaaggtcgaagtgcccaaggttgctacacagaccgttggtggagaggagttgccagtggctgggtggcgctcctacctgaatatggagttaacaatccccattttcgctaccaattcagactgtgaactcattgtcaaagctatgcaaggtcttcttaaggatggtaacccaattccaagtgcaattgctgctaattcaggcatttattctggcggcagcagcggcggctcaagcggaagtgaaacacctggaacttccgaaagcgctacgcctgaatcttctggtggatcttctggcggatcttccgcatgcgtcgacctggattctgaggagatggagatgacagacatgaagactgaaaaatccctgctggatgacatgctttcaaaggaaaaccttaatcgcgcataccagcaagtagtcagaaataaaggagccgagggggtagatggtatgaagtacacagaactgaaagactacttgaaagagcacggggatgagataaaagaacagattcgcaatagaaaatacaagccatcccctgtacgcagggtggaaatacccaaggagagcggagggacccggagtctggggattccaactgtagtggacagattcatccagcaggctatagcacaggtgctgaccccaatttatgagcccttattctctgagaacagttacggcttcaggccaaacaggtgttgtgagatggccattcaaaaggtgctcgaatacatgaatgacggcttccagtgggtggttgacatcgatattgaaaagttcttcgatcatgtgaatcatgataagctgattacacttgtgatgaagcacgtgaaagatggcgaaatcgtctccttgatacggaagtatttgaaatctggtataatgatggacgacgagtacaaagaaagtgtcattggtttcgcccaaggtggcaaccttagtccccttttatccaacattatgcttaacgaactggacaaagagctggaggctaggggactgaactacgcaagatatgccgatgattgcctgatcctggttggctcacagaaggcagccgaccgggtcatggaaaacgtttccaaatttattgagaaaaagctggggcttaaggtgaacatgaccaaaagtaaagtcaccaaacccaatgacatcaaatacctgggttttggttttttccgcgacaacagaagtaagttgtggaaggcgaaaccccatcaaaaatccgtggagaagctcaaaaagaagctgaagcagctcacttctcggtcctggggcgtggacatggatcacaggctcaggagaataaaacaagtcctcagagggtgggtgaattattttaggattgggaaattcaaagagatttgcgggagaattgatcggaatcttagatacaggctcaggatgtgcatttggaagcagtggaagaccgtaggcagacgttataaggccttgaggcagttaggcatggaaaaggagaccgcatggaagtgggcaaatagtagaaagggctacgcccgtgttgcctcatcaccgatccttacttacacagtcaccaacaaaagacttgccaaacggggcctggcctccatgacggacctgtaccagaaaatcaataagacctgtctggccgatatctga

SEQ ID NO: 1725 - DNA, 1911 bp, synthetic construct
  source 1..1911: mol_type = other DNA; note = FH-MCP-MG153-82
atggactacaaagacgatgacgacaagtacccctatgatgtacctgattatgctgccagcaatttcacacagttcgtccttgtagacaacggcggcaccggggatgttacagtggccccgagcaatttcgcaaacggcgtagccgagtggatctcctctaatagcagaagccaggcttataaggttacatgctctgtaaggcagtcttccgcacaaaatagaaagtacacaatcaaggtcgaagtgcccaaggttgctacacagaccgttggtggagaggagttgccagtggctgggtggcgctcctacctgaatatggagttaacaatccccattttcgctaccaattcagactgtgaactcattgtcaaagctatgcaaggtcttcttaaggatggtaacccaattccaagtgcaattgctgctaattcaggcatttattctggcggcagcagcggcggctcaagcggaagtgaaacacctggaacttccgaaagcgctacgcctgaatcttctggtggatcttctggcggatcttccgcatgcgtcgacgtgcagaagtcacgccagctcgagctccccttggagtctcgaggagaggcccctcgggtggagcggtccgggcagaccgagtcagctactagcggcaacgctagaccgggcatggacctccttctggaaaaggccttggaaaggcccaatctgttgcaagctcttaaaagggtacagcagaatagagggtcccccgggagcgatggtatgactgtcgatgagttgccagaccacttaagggctaattggcctacactccgtgagcaactgcttacaggaaggtaccagcctcggcctgttagaaggtgtgaaatccctaaacctgacgggggcaagagggagttgggaatccccactgtgctcgacaggttcgtgcagcaggcacttttacaggtcctgcagcccctgttcgatggctcattcagcgaacatagttacggcttcagacccggtcgtcgtgcacatgatgccgtgtgtgaagctcgggggtacgtacagtccggcaagagatgggtggtggatgtggacctcgagaaattcttcgatagggtgaaccacgatgtgctcatgtcacggctggctcgaagaataacggataagagaatgctttcactgatccgtcggtacctgaccgcaggtgtcttagccgatggagtcgtggtggagagatatgagggaacccctcagggcgggcctcttagcccactgctggcaaatgtgttgttggacgaggtcgatcaagaactggaacgcaggggacatacgttcgttcgctatgcagatgatctgagagtgtacgtgggttcactgcgcgcaggacagagggtgatggacagtcttatcaggctcttcggcaagttgcgtctgaaggtcaaccacgccaagtctgcagtcgcccgggcttgggaccgaccatttctgggtttcgctttttgggccgcgcgaggaggtcgggtggccatccgcattgctgcaaagtctattgcaaaaatgaaagtgagggtcagacagttaaccagaagagtgagagggcgatctctggaccagatagctgtagagttaaggaggtatctccttggctggaagggctacttcggcctcgccgaaactcctggggtgctgagagatcttgatgaatggatcagacaccgcctcagggccgtgcagctgaagcattggaaacgcgggcgcacaatctacagggagctcgtcgtcaggggaatggcccccacgaaagccaagcaagttgccattaacgccaggagctggtggcggaactccgcgctgggcattcatagtgctctccccaatagcctgtttgacgaactcggagtccctagactggcctccgatatctga

SEQ ID NO: 1726 - DNA, 1974 bp, synthetic construct
  source 1..1974: mol_type = other DNA; note = FH-MCP-MG153-83
atggactacaaagacgatgacgacaagtacccctatgatgtacctgattatgctgccagcaatttcacacagttcgtccttgtagacaacggcggcaccggggatgttacagtggccccgagcaatttcgcaaacggcgtagccgagtggatctcctctaatagcagaagccaggcttataaggttacatgctctgtaaggcagtcttccgcacaaaatagaaagtacacaatcaaggtcgaagtgcccaaggttgctacacagaccgttggtggagaggagttgccagtggctgggtggcgctcctacctgaatatggagttaacaatccccattttcgctaccaattcagactgtgaactcattgtcaaagctatgcaaggtcttcttaaggatggtaacccaattccaagtgcaattgctgctaattcaggcatttattctggcggcagcagcggcggctcaagcggaagtgaaacacctggaacttccgaaagcgctacgcctgaatcttctggtggatcttctggcggatcttccgcatgcgtcgacaatgtcaccgaaatcggaactaaggagtcccggaagcattattccgacaatgactattgccagaaaaactcaacagagtacgagggttacgatagagtgctgaccgaaaagcgtattactgagaataacaataccgacgccgacagcgaagtcaatggactgctggagagaattttggaacccgagaatctcaacagggcattcaagcaggtgaagaaaaacaaggggtcacatggtgtggacaagatggaggtcgagtacctcctgcagcacctgaaggataatggggaagagctgcggcagagcattcttaagggaaaataccggccaatgcccgtcaggagagtcgagattccaaaagataacggcaaaaaaagacagctcgggattcctactgtcatcgatcggatggtgcagcaagctattcagcaaatcctgaccccaatgtatgagccaacattttcagagactagttacgggttccgtccaagacgtagcgctcatgacgcattgaaaaaatgcaaggaatacgcaaatgaagggtttacttacgtggttgacatggacctggaaaaattctttgatactgtcagtcagagtaagatgattcaaatcctgtctcgcaccatcaaggacgggagggtcatctctcttatccataaatatctcagggcgggtgcaattgtggatagcaaatatgaggagaccaccgtgggcctcgtgcagggaggccctttgtcccctcttggctcaaatgtgatgctgaacgaacttgacaaagaactggagaagcgaggaattagatttgttagatacgcagacgacatgttgcttttcgcaaagtccaaaagatctgcaactaggatcctggaacacatcctgccatatattgaaggaaaactgaagctccgcgtgaatagggagaagacatccgtggcttatattggccgcataaaatttcttgggtatgggttctatcctgcaaagggcggcattaagttgcgagtccatggtaagtccaagaaaaagatgaagaatagaatccgagagataacttcaagaaggcagggcatttcttatgaggagttaaagctcaagctgaaacagtacgtcgtcggttgggtcaactatttcaaactggcgaatatgaagaagctgctcatttcaatagatcagtggctcaggcggcggttaagaatgtttatctggaaacggtggaaaaaggttaaaactagatacaagaggctgaaacagttgggatataatcacagcgatgctattaagtatgccaacacaagaaaaggctattggcaggttgcaggtagtcaaattctgggctgctctattacagacaaccgactgcgcaaacagggctatcagttttttagcgattactataagactgtgtcagcagatatctga

SEQ ID NO: 1727 - DNA, 1962 bp, synthetic construct
  source 1..1962: mol_type = other DNA; note = FH-MCP-MG153-84
atggactacaaagacgatgacgacaagtacccctatgatgtacctgattatgctgccagcaatttcacacagttcgtccttgtagacaacggcggcaccggggatgttacagtggccccgagcaatttcgcaaacggcgtagccgagtggatctcctctaatagcagaagccaggcttataaggttacatgctctgtaaggcagtcttccgcacaaaatagaaagtacacaatcaaggtcgaagtgcccaaggttgctacacagaccgttggtggagaggagttgccagtggctgggtggcgctcctacctgaatatggagttaacaatccccattttcgctaccaattcagactgtgaactcattgtcaaagctatgcaaggtcttcttaaggatggtaacccaattccaagtgcaattgctgctaattcaggcatttattctggcggcagcagcggcggctcaagcggaagtgaaacacctggaacttccgaaagcgctacgcctgaatcttctggtggatcttctggcggatcttccgcatgcgtcgacaagggtcgtatgcagaaaattaccatgagctctggtagtagaccccagaaagattccactgaatgcgaatcttacgaaggcgtgcaaacctttatggacatgacggagaataatttgaaagaggtccagtttgagcgaggcaacctgttagagtttatacttagcccatacaacctgaatcaggcttacctgcaggtgaaaagaaatcacggctcttgtggagtggatggtcttagcacagaggagctctcaggttatcttaagagacataaagatgagctggttgaatctcttaagtcaggcaaataccggcctaaccctgtgctgagagtggagattccaaaggagaatggcaaaaccagaccactcgggattcctacagtagtggaccgagtcattcagcaagcaatctctcaaatcctgagccctatttatgagaggcaattctccgataacagctatggttttaggccccatcggtcatgccacaaggcactcaagcgggctcaagagtatattacacaggggtataagtactccgtgtccctggatctcgaaagattcttcgacacagtgaatcatgcaatgttgattagactgctgtcacgtaccatccgcgatggaagggtgatctccctcatccataagtacctcactgcaggggtgatggtacggtgcgggtacgaggaatcagttgaaggaatccctcagggaggccctctcagcccactcttagcaaatataatgctgaacgagctggataaagagcttgtgcgccgcgaacacaaattcgtgagatacgcagatgattgcatgatcttgtgccgctccaaaagagcagctgagagggtatgcgattccatttctacatacattgaatccaggctgcatttgaaagtcaatcgtgataaaacaaaggtggcatatgtgggccgtgtgaaatacttaggatactccttttatatgatgaatggtaagtgccgtctcagattacaccctaaaagcgttacaaagatgaaagcaaggctgaaggaacttacgagcagatcatccggatggggctacgcaaagctgaaggacaagctcaaccaatttataaacggatggatgaactatttcaagatggctgatatgcggaatgtgttagaacagaccgataagtggctcaggcaccgcattagatcttatgtctggaagtcttggaaaaaagtgggtactaaatttaagaatcttatgaagtgtggaattgataggtggctggcgtggcagtgggcaaacactcggggcgggtactggaacacagctggttcccctatcctttccagagtgatttcaactgaacgactgaaactccaggggtacccctgtttagtagacttgtacgtcaagcttcaccaacatgatatctga

SEQ ID NO: 1728 - DNA, 1953 bp, synthetic construct
  source 1..1953: mol_type = other DNA; note = FH-MCP-MG153-85
atggactacaaagacgatgacgacaagtacccctatgatgtacctgattatgctgccagcaatttcacacagttcgtccttgtagacaacggcggcaccggggatgttacagtggccccgagcaatttcgcaaacggcgtagccgagtggatctcctctaatagcagaagccaggcttataaggttacatgctctgtaaggcagtcttccgcacaaaatagaaagtacacaatcaaggtcgaagtgcccaaggttgctacacagaccgttggtggagaggagttgccagtggctgggtggcgctcctacctgaatatggagttaacaatccccattttcgctaccaattcagactgtgaactcattgtcaaagctatgcaaggtcttcttaaggatggtaacccaattccaagtgcaattgctgctaattcaggcatttattctggcggcagcagcggcggctcaagcggaagtgaaacacctggaacttccgaaagcgctacgcctgaatcttctggtggatcttctggcggatcttccgcatgcgtcgacattgacgataaggcggaagctagggaagcaggcgccaagggtcaagaggcaggccaataccccgtgggccgaccctgtggggccgaatctatcactgctgcagccggacagaccaaggcagaagtgtctaggctgatggaggcagtgattgaaagcagcaatgtctggtcagcgtatcagaaagtggtgcggaacggaggcgccccgggggtggatggactgaccgttggctctttcaaagactggctcaagaagcattggccccgagtccgggccgctctgctcgatggttcatatctgccaagtgcagtccgcgccgtggatattccaaagccttctgggggcgttagaaccctcggcatcccgactgtactggatcgattgatccagcaggcactcctgcaggtactgcagcctatcgtagaaccaaccttttctgccagctcctacgggttcagaccaggacgcagtgcacatcaggcattacgggccgcgaagcattacgtgcaggaaggacgtgcatgggtcgtggatatggatttggagaagttctttgacagagtgaatcatgatattcttatgtcacgtgtggcccgacatgtggatgatgccagagtcttgaaacttatccgacgctacctggaggcgggcctgatgcgagatggtgtcgagactgcccgagaccagggtacccctcaagggggccctctctcacccctgctttcaaatatcctccttaccgattgggaccgagaattggaaaagcggggacacgccttctgtcgctacgcagatgactgtaacatatatgttcgctcagaggctgcagggcaacgtgtgatggccgctatgaaagtcttcctcgaggagcggctgaaactccaggtaaacgacgcaaaatctgcgtgtgccagaccatggaagcgcaaattccttggctataccctgactaatgcagggggctggatcaggttgaaggtggcccaggaaagcgtgatgagattaacagggagggtccgcgaactgatgcggcagggaaggggtcgttctctgacccacactatagaaacattgaatccggtcctgcgagggtggatcggctacttccaacttagcgaaagcaagactgtctggaaggacctggacgggtggttgaggcgaagactgaggtgtctgctgtggcgccaggcaaaaacacgtcaacggaggactgctctgctgcgtaagcaggggttgagtgaagcccgggcatggcactctggacacaatggacaagggccttggtggaatagtggagctagtcacatgaaccaggctttccccaaggcattctttgaccgcctccgccttgtgagtatgatcgatacaagccggtatttacaatgtcactccgatatctga

SEQ ID NO: 1729 - DNA, 1839 bp, synthetic construct
  source 1..1839: mol_type = other DNA; note = FH-MCP-MG153-86
atggactacaaagacgatgacgacaagtacccctatgatgtacctgattatgctgccagcaatttcacacagttcgtccttgtagacaacggcggcaccggggatgttacagtggccccgagcaatttcgcaaacggcgtagccgagtggatctcctctaatagcagaagccaggcttataaggttacatgctctgtaaggcagtcttccgcacaaaatagaaagtacacaatcaaggtcgaagtgcccaaggttgctacacagaccgttggtggagaggagttgccagtggctgggtggcgctcctacctgaatatggagttaacaatccccattttcgctaccaattcagactgtgaactcattgtcaaagctatgcaaggtcttcttaaggatggtaacccaattccaagtgcaattgctgctaattcaggcatttattctggcggcagcagcggcggctcaagcggaagtgaaacacctggaacttccgaaagcgctacgcctgaatcttctggtggatcttctggcggatcttccgcatgcgtcgactccgagctcctggagaagatcctgagcaacgacaatatgaatgccgcttataagagggtctgtgcccgcaagggagctggtggggtagatgaggttactgtggaagagctgggtgactatattaaagaaaactgggagagtataagggaacagatacggagaagggagtacaagccacagcccgtgagaagggtggaaatccccaaggtgggtggtggtgtgagaaagcttggcattcctaccgtcatggatagggtcattcagcagggagtcgtgcaggttattagccccatgtgtgagcccttatttagcgagtggagttacggattccgaccagacaggagctgcgaaatggccgttagacagcttctcgtgtacttgaacgagggatatgaatggatcgtagacatcgacctggagaagtttttcgacaatgtcccccaagacaggctgatgtctctcgtgcacgatataatcaatgatggagataccgagagcctgatccgaaagtacttaaaggccggggttatgacacctcaggggtacgaagagacaaagttaggtaccccacagggcggtaacctgagcccgctgctttcaaatattatgttaaacgaactggataaagaactggaagcaagagggctgcgatttacaagatacgctgacgattgtgtcatagccgttcggtctgagtcctcagccaaacgggtgatgcgaacagtgaccgattggatccagcgtaagttgggtttgaaagtgaatatgaccaagactcatattacaagaccccagaagctcaagtacctgggcttcgggttctacaaagatagcaaggcaaaagaatggaaatgcaggccacaccaggagtcagtgaagaagtttaagtgtcggttaaaagaactcacgtgtagaaagatgccaggtaccgtcaccggtcgcatagagaagattaaccaagtgacacgggggtggataaactactacgctctggggtctatgaaaaaagctatgaccgagatcgatgctcacttacggacccgcctgaggattatcatctggaagcagtggaaggtccccaagaaaaggcagtggggtctgcaaaaactgggcgtgaataaagatctcgctcgtctgacggcatactgtggcgatcgctattactgggtcgccacaaaaacatgtttttcacgagcagtctccaaaaaagtactggccaaggctggtctgatttcatgtcttgattattactctgagagacacgcgctgaaactgtgcgatatctga

SEQ ID NO: 1730 - DNA, 1971 bp, synthetic construct
  source 1..1971: mol_type = other DNA; note = FH-MCP-MG153-87
atggactacaaagacgatgacgacaagtacccctatgatgtacctgattatgctgccagcaatttcacacagttcgtccttgtagacaacggcggcaccggggatgttacagtggccccgagcaatttcgcaaacggcgtagccgagtggatctcctctaatagcagaagccaggcttataaggttacatgctctgtaaggcagtcttccgcacaaaatagaaagtacacaatcaaggtcgaagtgcccaaggttgctacacagaccgttggtggagaggagttgccagtggctgggtggcgctcctacctgaatatggagttaacaatccccattttcgctaccaattcagactgtgaactcattgtcaaagctatgcaaggtcttcttaaggatggtaacccaattccaagtgcaattgctgctaattcaggcatttattctggcggcagcagcggcggctcaagcggaagtgaaacacctggaacttccgaaagcgctacgcctgaatcttctggtggatcttctggcggatcttccgcatgcgtcgacaaggggaggatgcagaaaatctctacccagagtgactcccggccgcgtaaggatcgccctgaggccgaatcttatgaaggagtgcagacctatatggacgtggtggacggttgtttaacgaccgaacagcctaaaaccgagtatccactcctggagcagatcctcagctccgcaaacctcaacgcagcttatctgcaagtgaagagaaacggaggcgcggccggtgttgataagatggactgtgacaggctgcttggctacttgatcgaacacggggaagagttgaaggaaaggatccggcagcggacttaccgccccaaccctgtgcgtagagttgaaatccctaaggataacgggggcaagaggcagctggggataccaactgtggtggatcggatgttccagcaggctatagccagggtcctcagccccatatatgaaaggcagtttagcgaaggatcttacggtttcagacctaagcgagggggcaagagagcactgattgccgctacgaaaattgtggagcgagggtaccactacgcggtggatatagacttagagagattttttgatacggtcaatcatgcaaaactgattgagatcttacagcgcactgtcaaggatgacgccgtgatctctcttattcacagataccttaatgcaggagtgatgaaggatggaaagtatgagccctcagaggagggcaccccccagggtggacccctctctcctctgctggctaatattatgctgaatgaactggacaaagagttggagaaacgcggtcatcccttcgtgaggtacgctgatgatggtttaattttcagccgttcaaagagagctgctgagagagttagagagtctatctcaaagtttatagaaggacacctgaaacttaaggtgaatcgggaaaagactgaggtggcgtacataggccgccttaaatacctgggatatggcttttatgtacggaacgggaaatgtcggctgagacttcataaaaaatctgaggctaagttgcggaggcgactgaaagcaattacctccagaagtaatggcatgggttatggtaagcgcaaggacgcacttcggcaataccttcgcggttggactgagtattactctctggcagatatgggcaataaggtgaaagagatcgatcagtggctgcgcaggcgcatcagaatgtgtatctggaaatcttggaaaagaattaagactagagtctgtaacttaatccggtgcggcatcgataagagaaaggcatatgagtggggaaatacttctaagggctactggcggattgccgactcatggattctcaccagagctctccctacagacaggttacacacagcgggctacgactggataggatgctattacactgcctcatccttgcccaagggagatatctga

SEQ ID NO: 1731 - DNA, 1869 bp, synthetic construct
  source 1..1869: mol_type = other DNA; note = FH-MCP-MG153-88
atggactacaaagacgatgacgacaagtacccctatgatgtacctgattatgctgccagcaatttcacacagttcgtccttgtagacaacggcggcaccggggatgttacagtggccccgagcaatttcgcaaacggcgtagccgagtggatctcctctaatagcagaagccaggcttataaggttacatgctctgtaaggcagtcttccgcacaaaatagaaagtacacaatcaaggtcgaagtgcccaaggttgctacacagaccgttggtggagaggagttgccagtggctgggtggcgctcctacctgaatatggagttaacaatccccattttcgctaccaattcagactgtgaactcattgtcaaagctatgcaaggtcttcttaaggatggtaacccaattccaagtgcaattgctgctaattcaggcatttattctggcggcagcagcggcggctcaagcggaagtgaaacacctggaacttccgaaagcgctacgcctgaatcttctggtggatcttctggcggatcttccgcatgcgtcgaccggctttctgatctgatccttgaaagttctaatatggagaaggctattagaaaagtcgtgtccaaccgggggtctgccggaatcgacgacatgcctgtggacgaaatcagggcttggatggaggtgaacggggatgaactcgctgaacaaatccgggaaatgaaatataaaccttctcctgttagacgagcctatatacccaagcccaatgggaagaaacgtcccttaggcattccaaccgtcgtagacagagtggtccagcaggcgacctatcagatcctgtatcctatatttgactctacgttctctgattcctccttcggttttagagaaggccgtagtgcccatcaggcaatagagcgcactctggaatacctcaatgagggctacgagtgggttgttgatttagatatagaaaagttcttcgatatggtgaaccatgataaattaatcagcatcattaggctgaaggtaaatgagaaagaaactttgcacctcattagaagcttcttgaaagcaggggtcatggaggaaggaaaactgaaccgcaacgatctggggactccgcagggcgggaatatcagtccccttctggcgaacatctacctggacgtgtttgacaaagaattggaaaatcgtgggctgaggttcgtgcgctacgcagatgatgtgactatttactgccgttcagaaatggctgcaaaccgcgtaatgcgctccgttagctcttggctggaacgcaagcttttcctgaaagtttcccccaccaaaactcacgtcgtcaggcccccagagagcacctttctgggatttactttctggaagggcagggatggatggaaatgcaaaccagctaacgatcgtaaacagcgcctttacaaaaacatgaaagagctgctgtgtagacgcaaagccgccgccatgcccctgtcatatttgtttaccaaagtaaatcagaaggtgagaggttggattaactatttcagcattgggtcaatgaagaggtttttaatcgaatttggtcagtggctcagacataaaatacgtgttgttattttcaagcaatggaaacgtccaaaaaccctgtttaaaaatttaatgattttaaacaagcagttcaagaccggattttctaaagaggagatcaggcagaccgccaactcaaggctcggtctgtggaggaccactgggtggagaaccgtgaattttatactgagcccaaaggtgctggccctcccgaataaggagaaagagcgaccagggttgatagatccagttggatactatctgaacctgcaaaacaagtctgatatctga

SEQ ID NO: 1732 - DNA, 1797 bp, synthetic construct
  source 1..1797: mol_type = other DNA; note = FH-MCP-MG153-89
atggactacaaagacgatgacgacaagtacccctatgatgtacctgattatgctgccagcaatttcacacagttcgtccttgtagacaacggcggcaccggggatgttacagtggccccgagcaatttcgcaaacggcgtagccgagtggatctcctctaatagcagaagccaggcttataaggttacatgctctgtaaggcagtcttccgcacaaaatagaaagtacacaatcaaggtcgaagtgcccaaggttgctacacagaccgttggtggagaggagttgccagtggctgggtggcgctcctacctgaatatggagttaacaatccccattttcgctaccaattcagactgtgaactcattgtcaaagctatgcaaggtcttcttaaggatggtaacccaattccaagtgcaattgctgctaattcaggcatttattctggcggcagcagcggcggctcaagcggaagtgaaacacctggaacttccgaaagcgctacgcctgaatcttctggtggatcttctggcggatcttccgcatgcgtcgacataagtctggaaaaagtattatctccgcaaaatatgttgctcgcttgtaaacgcgtccgcgccaacaagggcgccccaggggtcgatgggatgacagtcgatgagctggagggacactttcgacgacactgggcttcaatatgcgctcatatcagagagggccgatacatcccatcccccgtgaaacgagtggacatccccaaacccgacggcgggacgagaatgttgggcattcccacggttcaggacaggttgatccaacaggcaatcgctcaggtgttggtggaacacttcgatcccacgttcagcgagttttcctacgggttcagaccagggaggtccgctcatcaggcaatcgaacagactcagcgatatattgccggcgggtgtagttggattgtggagatggatctggccaaattttttgataccgtgaaccatgaccgcctgatgtctactcttgagagatcctgtagggataaaatgctgatcaggcttatccggcgatacttaaggaccggcattctcgcagacgggttggttacccccagagacgagggcacgccccagggaagtcctctttcccccatactgtccttaatcgtgctggacgaactggacaaataccttgaaaagagaggagtaaagttctgcagatatgcagatgactgtaatatttacgtcggatccgaaagagcaggcaagagagtattagaaaatacgataaaatttatcgaagaaaccctgaagctgcgggtcaatagggacaaaagtggagttttcagacccagacgggctaagttcttgggctacactttcgtcggaactacaggtcaacctctggttcaccccaagtcatttaagaggttgaaggacaagctgcgtacagtcttccacagggctcgtggagggagcctttttcagacgattggagagctgaacgccatcctgcgagggtggcgacagtattgtaggttagacaataggaaagatgtgttcgaggcacttgacatccatattcgccggtaccttagaaagttggtttggattgcgtggaagagacccaggactagagaacgtgaactgagaagacacggactcgacgggttcagggcatggaagtcagcgaataacggcaggggagcttggtggaatgtgggcgcgctgcacatgagagacgctttcccaaagagcttttttaggcgacagggtctctacagccttctcgaaatgcgtgatatctga

SEQ ID NO: 1733 - DNA, 1890 bp, synthetic construct
  source 1..1890: mol_type = other DNA; note = FH-MCP-MG153-90
atggactacaaagacgatgacgacaagtacccctatgatgtacctgattatgctgccagcaatttcacacagttcgtccttgtagacaacggcggcaccggggatgttacagtggccccgagcaatttcgcaaacggcgtagccgagtggatctcctctaatagcagaagccaggcttataaggttacatgctctgtaaggcagtcttccgcacaaaatagaaagtacacaatcaaggtcgaagtgcccaaggttgctacacagaccgttggtggagaggagttgccagtggctgggtggcgctcctacctgaatatggagttaacaatccccattttcgctaccaattcagactgtgaactcattgtcaaagctatgcaaggtcttcttaaggatggtaacccaattccaagtgcaattgctgctaattcaggcatttattctggcggcagcagcggcggctcaagcggaagtgaaacacctggaacttccgaaagcgctacgcctgaatcttctggtggatcttctggcggatcttccgcatgcgtcgacaacaactctgacccctctatgaatcccgatgggggagatgcagtgtggcgatctgatcgcgaaccagcactggataatctgatggccaggattctcgaaagggataatgtgcggaaggcatggcagcgagtgaaatctaacaagggagccccaggttcagatggaatgtctctcgaagactttcccacatacgcccgtgaacactggcaggaaatcaggcagtctctcctcgatggtagctaccagccgagacccgtacgaagagtggtcatcccaaagccgagggataagggagagaggaagctgggtgtgccgtgcgtcattgaccgtgtgattcagcaggctatcttgcaagttctgacgcctatgttcgatcccgcatttagcgagagctcatatggatcccgcccccatcgctccgctcacggcgcgatccagcaagtgaaaaccattgtgaaagctgggcatagaattgctgttgatctggacttagagaaatttttcgatactgtgaatcacgacgtcctgatgtctcgggtcgcccggaatgtgcccgacaaagtgctcttggggctgatcggacggtacctccgggccggggtcttagtgggggagactatcgagcctacgagctggggcacaccccagggcagtccattgtcccctcttttaagtaatatcctcctggacgacctcgacaaggagctcgaagcacgagggcacagattcgtcagatatgtggacgacctggtgatcttggtaaagagccgacgcgccggccgaagggtaatggccaaaattagccggtacctgacacagacattgaaactcaaggtgaacagggagaagtcacgcgttgtgaaaatcgaagatcttaactatctgggctttacctttcgaggaatccggatcttcgcaagtgatcaagccttgcaagattttaagcatagactgcgtgggttgactagtcggtcttggggggtatcaatgagtgagcgttttgagcgtctcaaccgctacctgcggggctggatgaactatttcggtattagtcagcattacaccccaattgaagaactcgatggctggctgaggagaaggattaggatgtgctactggaaacagtggcgtcgccctcgcactaggatcgcgaacctcctgaagctgggaacgtctaaacgacacgctatactcactgggatctctcgtaaagggttctggcgactgagcaagaccctggcaacccagacaggcatgacaaacgagtggctcgaacaacagggcttgctgtctatccggaagctctggatgaaagtgcaggggtatgtggatatctga

SEQ ID NO: 1734 - DNA, 1944 bp, synthetic construct
  source 1..1944: mol_type = other DNA; note = FH-MCP-MG153-91
atggactacaaagacgatgacgacaagtacccctatgatgtacctgattatgctgccagcaatttcacacagttcgtccttgtagacaacggcggcaccggggatgttacagtggccccgagcaatttcgcaaacggcgtagccgagtggatctcctctaatagcagaagccaggcttataaggttacatgctctgtaaggcagtcttccgcacaaaatagaaagtacacaatcaaggtcgaagtgcccaaggttgctacacagaccgttggtggagaggagttgccagtggctgggtggcgctcctacctgaatatggagttaacaatccccattttcgctaccaattcagactgtgaactcattgtcaaagctatgcaaggtcttcttaaggatggtaacccaattccaagtgcaattgctgctaattcaggcatttattctggcggcagcagcggcggctcaagcggaagtgaaacacctggaacttccgaaagcgctacgcctgaatcttctggtggatcttctggcggatcttccgcatgcgtcgaccaccgggagcaaaagataggtaagtctggttacagctgcgagggaacggtcgaacctgagtctaataagcgtgctcggagtgtggccggtctggaagccgaagagaaaaacggcgcctattctcttctggaagaaattctccaccgggacaacttgaatgcagcttacaagcgggtaaagcagaatgggggggcagctgggatcgacaaaatgacagtccatgaaatgctgccatacctgagggaacacggaggtgagcttattgcctcaatacgcggtgggtggtacaagcctaaacccgtgcgccgcgtcgaaatcccaaagcctgacggcggagtgcgcctgctcggggtacccaccgtcatcgaccgaatggtgcagcaggcaattacccaggtcctgcagcccattttcgaggctaccttttccgattcctcctatgggttccggcccggaagaggagcacatcaggccattgttaaggctaaagaatattacgaggaaggctacacatctgttgtagatatagatctcgccagatatttcgacaccgttaaccatgacatccttttaggattgatttcccgtgaaatacaggacaaaacagtcgtgaggctcatccgcaagttcctgaagtccggcgtgatggcgaatggtctttattcaccaacggaggaaggcaccccccagggaggcaatctctcccctttactcagcaatatctatctgaccgaatttgatagaatgctcgagtccagggggcacaagtttgtcaggtatgccgacgatagcaacatttatgtaaagagccgcagggctgcagaaagggtcatggaaagttgcactaaattcttggagggaaagctcagactgaaggtcaatagggacaagtccaaaacagggtcaccccttagagggaagtttctgggatttagcctctacaagatcaaagggaagactgggattcggcctcatcagaaaagcctgcgacggctgaaaagaaacatcaagaaacttaccagtaggaaacaggccaaatccgccgaaggtattcttgtcgtcctcaaaaggtacacaacagggtggcttggctattattctattgcagatatgaagtccaagattcaggagatcaacgagtggatgagacgcagaattagacagatattctggaaacagtggaaaaaaatccgaatgaaacacgacaatctccggagattgggcattcctgacaagaaggcatgggaatgggctaactcacgactcgggtattggcgcatagctggatcatggatcttgacccgatcactgactaacgagtatttggcctccattggttatgatgatattgcaaaaagatacgaggctctccatctcaactacgatatctga

SEQ ID NO: 1735 - DNA, 1965 bp, synthetic construct
  source 1..1965: mol_type = other DNA; note = FH-MCP-MG153-92
atggactacaaagacgatgacgacaagtacccctatgatgtacctgattatgctgccagcaatttcacacagttcgtccttgtagacaacggcggcaccggggatgttacagtggccccgagcaatttcgcaaacggcgtagccgagtggatctcctctaatagcagaagccaggcttataaggttacatgctctgtaaggcagtcttccgcacaaaatagaaagtacacaatcaaggtcgaagtgcccaaggttgctacacagaccgttggtggagaggagttgccagtggctgggtggcgctcctacctgaatatggagttaacaatccccattttcgctaccaattcagactgtgaactcattgtcaaagctatgcaaggtcttcttaaggatggtaacccaattccaagtgcaattgctgctaattcaggcatttattctggcggcagcagcggcggctcaagcggaagtgaaacacctggaacttccgaaagcgctacgcctgaatcttctggtggatcttctggcggatcttccgcatgcgtcgacaacgtcacaaatgacggctttaaggatcgacaacggcatattgaggattacctgcaaatggtgccagccgagcagggcgagaacgcaggcgtctcagtgtatcagcgaattatcgagaataacaatacgatcactgatttttggacagacaaccttttggagctgattctgcgaactgaaaacctgaacatggcttatcgaaaagtaaagtctaacaaaggcaccggaggtatcgacggtatgcaggtggacgagttactcccatatctcaaagagaatcaaacatttctgattcaacagattagggacggcaaatataagcctaatcctgtgagacgggttgagattcctaaggaggaaaagggcactagaaaactcggtatccccaccgtcgttgaccgcgtgatccagcaggccataagtcaggagctgaccccgattttcgaggagcagttcactgataacagcttcgggttcaggcctcgacgtagtcagcatgacgctctgaggcggtgccaggagtacgtggaagagggatacgagtacgtggtcagcctcgatcttgagaagtacttcgacacaatcaaccactccaagttgatagaggtgcttagtcgaaccattaaagacgggaaggttataagtctgatccataaatatcttaatgctggaatcctgcaaaacggtatgttcgaagagacagagtcaggggtaccccaaggtgggcccttgagtcccctcctgtctaacgtgatgctgaacgagttggacaaagaactggaacgcagaggccacaagtatgtgagatttgcagatgattgtttgatcttttgtaagtcccgtaaaagtgcggagaggacgctgaaaaacatagtaccctatatcgaaaccaagctgtttctgcgaatcaaccaggagaagacagagatttctcatatttcaggcatcaaatttctgggatacgcattctatcagtcaaagggacggtgcaggctgcgagttcacccaaagtctgtccggaaaatgaaggacaaactcaaaaaactgctggaaaagggcaatgggtgggggaacgattatagaaaacaaagactcaaggattttatcacaggatgggtgaactacttcagcttggcagacatgaagaagctcatgcaggtgacggatcgctggattaggcggaagattagggctatttattggaaacagtggaagaaggtgaagacacgctatagaatgctgaaaagtttgaagctgcctgagtaccgcgtgcatgaactggctaatagtcgcaagggttactggcgaatggcaaaggtgctgaatgtggcactgaccaataagcttctcgcaaagctcgggtacaaaagtatgttggatcattacttaaagatctgtgagaacgatatctga

SEQ ID NO: 1736 - DNA, 1872 bp, synthetic construct
  source 1..1872: mol_type = other DNA; note = FH-MCP-MG153-93
atggactacaaagacgatgacgacaagtacccctatgatgtacctgattatgctgccagcaatttcacacagttcgtccttgtagacaacggcggcaccggggatgttacagtggccccgagcaatttcgcaaacggcgtagccgagtggatctcctctaatagcagaagccaggcttataaggttacatgctctgtaaggcagtcttccgcacaaaatagaaagtacacaatcaaggtcgaagtgcccaaggttgctacacagaccgttggtggagaggagttgccagtggctgggtggcgctcctacctgaatatggagttaacaatccccattttcgctaccaattcagactgtgaactcattgtcaaagctatgcaaggtcttcttaaggatggtaacccaattccaagtgcaattgctgctaattcaggcatttattctggcggcagcagcggcggctcaagcggaagtgaaacacctggaacttccgaaagcgctacgcctgaatcttctggtggatcttctggcggatcttccgcatgcgtcgacatagaaaaagtgctccatcagggcaacctgctccaggcttaccgacaggtgctggctaataaaggcagcgcaggagtagatgggatgccagttaacgaactcgcagcacatttgagagtgaatagagatgctctcgcctccgccatactcggagggcagtacctcccacaacctatcctcggtgtggaaatcccaaaatctaatggccagaagcggttgctgggcattcctaccgtgacagatcgccttctgcaacaagcagttgatcagacgatagcccctctgtttgaattggagttcaaggctcactcatacggcttcagaccaaaccgcaacgcacagcaggctgtgctgcaggcccagaagcacatcaatgccggataccagcacatagtggacatcgaccttaagtcattctttgatgaagtggaccactgccttctgctgcagctcatctacagaaaagtgaagtgtccgctgacactgaggcttatccggaaatggctcagagccccaatcctcgtaggcggaaagttgaccaagcgtcgcaagggagtgccacagggaagtcctctgtctccccttcttagcaacatcctcctgcacgaactggataaagaactggagcggcaaggacttttatacgtacgatatgctgatgactttagcatttatactcaatcagagagcgaggccaggcagattggcaactctctctacctttttctgaaaaacaaacttaggcttcccatcaatcgggagaaaagcgggatccgcaggcctgcggactttgaactgctcggatatagattcgtcccaacctaccggaagggggacaaggggaagtatcaactggtagttgccgagaaagcttgggtccgcctgaagcagaatctgaaagagcttacccggaagactacgccttccgcctttgccgaaagaattgagcaactgaaagaagtgcaacgcgggtgggtgaactacttccgccttgcatcaatgcaggagaagttaaaacaggttgattcttggctgaggaaccgactgaggcattgtatttggcatgattggaagaaaccagagaggaagaggaaaaacctgatccaactgggtgtgtccaagcatgaagcatatgcctggtcacagacaaggaaaggtggttgggcggtggcccagagcccaatccttgtgacaactatcacccttaagagactggttaagaaagggtacgaaagtctgtttgattattataaacaggtaagcccacagctgaacgagcctttgtatactaggcccgtgagaacagtggtggatatctga

SEQ ID NO: 1737 - DNA, 1872 bp, synthetic construct
  source 1..1872: mol_type = other DNA; note = FH-MCP-MG153-94
atggactacaaagacgatgacgacaagtacccctatgatgtacctgattatgctgccagcaatttcacacagttcgtccttgtagacaacggcggcaccggggatgttacagtggccccgagcaatttcgcaaacggcgtagccgagtggatctcctctaatagcagaagccaggcttataaggttacatgctctgtaaggcagtcttccgcacaaaatagaaagtacacaatcaaggtcgaagtgcccaaggttgctacacagaccgttggtggagaggagttgccagtggctgggtggcgctcctacctgaatatggagttaacaatccccattttcgctaccaattcagactgtgaactcattgtcaaagctatgcaaggtcttcttaaggatggtaacccaattccaagtgcaattgctgctaattcaggcatttattctggcggcagcagcggcggctcaagcggaagtgaaacacctggaacttccgaaagcgctacgcctgaatcttctggtggatcttctggcggatcttccgcatgcgtcgacaacaggtccgtgcccgctgctaccaggagcagagacgaaccggaagctggtgagcgctccgaaccggagagcatcccaaatgcgacattgctcgcaagagtcctggcacgggagaatctgcagcgtgcactcaagcaggttcggcagaatagaggagctccaggtatcgatggtatgactgtagatgaacttccttcctacctcaggcatcattggttggagatccgcgcccagcttgaggctggaacgtattgcccccagcccgtacgcagggtggaaatacctaaaccagacggaagaaagcggcttcttggaatccctacagtactggatagatttatacagcaaagcattgcccaggtagtcagcgctcagtgggagcctcacttccacccacgatcttatggtttcaggcctcagaggagtgctcaccaggccctgagacagcttcaaactgatatacgcgacggaaaacgatgggtcgttgacctggatctggaggccttctttgatagggtgaatcatgacaggctggtgtcacgacttagacgacatgtcccagacgcagcactgttgcgactcattaataggtttcttaaggcgggcgttagagtcgggcacgctacagaggctaccacacgaggggtcccccagggcggccccctttctccagtgttggccaacgttgtgttagacgagctcgattgggagttagagcgaaggggacacagattcgtgcgatatgctgatgactgtaatatcgtggtcggatcacaacatgccggggaacgagtgaaggcctcagtaacaagattcatcgcgaccacacttaggctttccgttaatgccaataaaagcgctgtggatcgaccatggaacagaaaatttctcgggtttacaattacatctaaaggcactcgtctgaaggtcgccgacgctgcaattgacaacctgaagcaccgggtccgggagctcaccagacggaccagggggcataggctcacagacgtgattgcccagttgagagaagcgttactgggatgcaaggcgtactttggggtggccgaggttcagagtccactgcgcgaaatcgacaaatggttgcggcgaaagttacgatgctatacctggaaacagtggggtagagccgggtacaggggcctgagaaggcggggggtgtctgtgcgggaagcctggaacacgagcaagtcagcacacggaccctggaggctgtctaggacccctgcattggcacaggctcttcccgcccgctacttcagcactctggggctccccaccctcgccgccgcagatatctga

SEQ ID NO: 1738 - DNA, 1854 bp, synthetic construct
  source 1..1854: mol_type = other DNA; note = FH-MCP-MG153-95
atggactacaaagacgatgacgacaagtacccctatgatgtacctgattatgctgccagcaatttcacacagttcgtccttgtagacaacggcggcaccggggatgttacagtggccccgagcaatttcgcaaacggcgtagccgagtggatctcctctaatagcagaagccaggcttataaggttacatgctctgtaaggcagtcttccgcacaaaatagaaagtacacaatcaaggtcgaagtgcccaaggttgctacacagaccgttggtggagaggagttgccagtggctgggtggcgctcctacctgaatatggagttaacaatccccattttcgctaccaattcagactgtgaactcattgtcaaagctatgcaaggtcttcttaaggatggtaacccaattccaagtgcaattgctgctaattcaggcatttattctggcggcagcagcggcggctcaagcggaagtgaaacacctggaacttccgaaagcgctacgcctgaatcttctggtggatcttctggcggatcttccgcatgcgtcgacaatacatccaagcagcaggaaggaggagttaaaagccgagtgtggtactctttatatgacagactgctgcacgcagatgccctcagcgcagcatttcggaaagtgaagtccagcaatggggcccccggcattgatggccagagttgcaagggatttgccctgaaccagacagaagaaattgctaaacttttgtctgaactgaggaccaagacgtacaggccatcccctgtgaaacgggttgaattggtaaaagaagatgggtcaattagactcattggtattcccaccgtccgtgaccgagtggtccagcaggtgttaaaaagagccattgagccaatctttgagccccagtttcatgatgggtcttatggctatcggccaaaacgttcacctcaaaaggcagttgcacatgccatcgaattaatgcgcgaacgcggcctggagcaggtcgtggacatggatctttcaaaatgctttgatcgactcgatcacgaccttattctgaaagccgtaaagaggtccatcaccgatggtagcatactcgctctgatacggatgtttttggagtccggagtaatgaagtacggtgaattgtccccgaccgaaatcgggtccccccaaggcggagtgattagccctctgcttgccaacatatacctcaacgactttgaccagaccatgaaaagtagaggccacgaggtggtgagatatgctgacgacattttgatctttaaaggcagcagaaaaggtgctgaacatgccttaaaggtagcaacagaagtcctggagaaggaactcaagctcactgttaaccagcgcaagacgcatctcgccaacctggatgaaggtgtggcattcttaagtttcgtcatctaccagagctatactctcataaaagagtcaaaggtggatggtctgaaggcgaagctgaagctcgccactagacgcaatactccggtaaacttggagaaggtgatcagagacatcaatcccatcttgcgggggttcgttaattacttcaagctggcaaactgtaagactgtcctgaggaatgtgatgagctggttgcggcgacgcctccgggctttgcagatgaagttatggaaaaccccagccaaactgcacaggaagctgagacagcttggttataagggtgagtttaaacagataaagatggcctcctggaagaatgccgcttgccagcaggcacacatggccatgcctaacgcgtggtttaaagaaatcggtctctaccaccccccccagttagaaaccgggcaattgaccttaattgatatctga

SEQ ID NO: 1739 - DNA, 1953 bp, synthetic construct
  source 1..1953: mol_type = other DNA; note = FH-MCP-MG153-96
atggactacaaagacgatgacgacaagtacccctatgatgtacctgattatgctgccagcaatttcacacagttcgtccttgtagacaacggcggcaccggggatgttacagtggccccgagcaatttcgcaaacggcgtagccgagtggatctcctctaatagcagaagccaggcttataaggttacatgctctgtaaggcagtcttccgcacaaaatagaaagtacacaatcaaggtcgaagtgcccaaggttgctacacagaccgttggtggagaggagttgccagtggctgggtggcgctcctacctgaatatggagttaacaatccccattttcgctaccaattcagactgtgaactcattgtcaaagctatgcaaggtcttcttaaggatggtaacccaattccaagtgcaattgctgctaattcaggcatttattctggcggcagcagcggcggctcaagcggaagtgaaacacctggaacttccgaaagcgctacgcctgaatcttctggtggatcttctggcggatcttccgcatgcgtcgacctgaaggcagagtacagaaaaggctgtcttcagatggactctgcagaacacaaggaatatgccggcgcacagagcgctgaagctagggagcgtagggaacaggatggtgctaaggacctcctggaagcgatattggataaaaggaccttgttcgaagcatttaaacgcgtgaaggctaatcacggagcacccgggattgacggcatgaccgtggatgaagttcttccctggttgcaggaacatgttgaagagctgagacaaagcataagggacggaaaatacaaaccctatccggtccgacgagttatgattccaaagccagacggaaacggcgagcgtaagctgggtataccaactgtcatcgaccggattatccaacaggccattgcgctcaaactcacacctatttttgagcctctctttgcagatgagtcatacgggtacagacccggcaggaattgccagatggcaatgatgagagtgaaacagtgcgtggatgaaggatacattcatgtggctgaggtggacttaagcaaatattttgacacattaaatcatgagttgctcatgaacttgctgcacaggcagattcaggataagcaggtgacagagcttataaagcgctatcttaaatcaggtgtgatggaaaatggagtcgttactgagacagaagaaggaagcccccaggggggccccttgtccccactcctcgctaatatctaccttaacgaatatgatcaagagatgaagcggaggggcgtggccattgtccgatatgctgacgatatagtggtactcgcaaagagtcagcgcgcggctgaaaggcttttagagtctagtcgcaagttccttgaggacaaattgaaactcaagcttaatcaagacaagagccgcgcaatttctatctacagtaaaaaatttaagttcctgggctacgccatgggaaagaacaaaaacggaaattacattagggcgcataagagcagccttaagaaggcaaaacaaaagctcaaagagaaaaccaaaaggaatcgcggtaagaacgtccgtgaggtaatgaaagccgtgaaggattacatcatcggttggctgaatcactaccacatagctagtatcaaaaatacactcattgaatgggacgggtggctgcgtcgtagattccgtatgtacatttggaaacagtggaagaaacctcggacccgtgtcgagagcctgaggaaacttggcattcccagctggcaggcctaccagtgggggaactctcggttaggcttctggagagttgccggaagtccagtgctgactaggagcatcaccaacgaaaaattggtgcaggcaggttactttggtattctgaaacagtacgaaagactgagaaaacacttatcagacgatatctga

SEQ ID NO: 1740 - DNA, 1824 bp, synthetic construct
  source 1..1824: mol_type = other DNA; note = FH-MCP-MG153-97
atggactacaaagacgatgacgacaagtacccctatgatgtacctgattatgctgccagcaatttcacacagttcgtccttgtagacaacggcggcaccggggatgttacagtggccccgagcaatttcgcaaacggcgtagccgagtggatctcctctaatagcagaagccaggcttataaggttacatgctctgtaaggcagtcttccgcacaaaatagaaagtacacaatcaaggtcgaagtgcccaaggttgctacacagaccgttggtggagaggagttgccagtggctgggtggcgctcctacctgaatatggagttaacaatccccattttcgctaccaattcagactgtgaactcattgtcaaagctatgcaaggtcttcttaaggatggtaacccaattccaagtgcaattgctgctaattcaggcatttattctggcggcagcagcggcggctcaagcggaagtgaaacacctggaacttccgaaagcgctacgcctgaatcttctggtggatcttctggcggatcttccgcatgcgtcgacttggaaaagattttgaaccgccgcaacatcgaacgagctattaaagcagtggaaaggaatcacggagcgggaggggtggatgacaggcaatctgacgagctcagaccatttgtgaacgcttcttgccagtccttggtcaatcgcgtgcgagaaggaggttatcagccttcacctgtgaggaaggtggaaatcccaaaggacactgggggtgtgagaatgcttgggattccaacagttcttgatcggatgcttcagcaggccatctatcaggtactgagccctatctacgaagaagcctttgacaagcacagttacggatttcgtccccgaaaaaacgcccaccaggcagtgttcacggcccagggctacctgaacgaggggaatagttggataattgaactcgatcttgaaaagttttttgataaagtgaatcaccagaaactgatgcacctcttgagccagaaagtaaaggataagtctacactgctgctcatcaatagctatctgaagactgggattatggagggaggtgtggtctcccaacgcatcgagggtacacctcaaggtagtccactgtcacccctgctgtctaacatcatgctgcacgagctggaccaagagctgaacaaaagaggacacaagtttgtgagatatgccgacgactgctcaatctatgtaaaatccaagaagtctgcaatacgagtggccaaatccataaccaaatttatagagtgcaatctgctgctgaaggtgaatagggagaagaccaaaatcagcagggctcacgagtcctatctgctcggattttccttctaccaaaccaaaggaaggtacgagatcagaatctcacctaagtcagtcaatagagtcaaggccaaatgtaagttgatcacgcggtcatcagacccgaagagtgagaccgtgaagttgactaaacttgactctattatcagaggctgggtgaactatttcaagatcgcgaatgcaaaatccattatggaaaaactggatgaaatgattcgaactcggttgcgtatctctacttggagacgatggaagagaattggtaccaagatcactaacctgctgaagcttgggattgagaaaagccgtgcctacatgtggggaaatacttctaagggcgcctgtcgggttgctcacagtcccatactgaagaggaccctggaaataaaatacttccgcaagcgcgggtacattggattctacaactactggcaagccgagagacaacctctgctgtttgatatctga

SEQ ID NO: 1741 - DNA, 1935 bp, synthetic construct
  source 1..1935: mol_type = other DNA; note = FH-MCP-MG153-98
atggactacaaagacgatgacgacaagtacccctatgatgtacctgattatgctgccagcaatttcacacagttcgtccttgtagacaacggcggcaccggggatgttacagtggccccgagcaatttcgcaaacggcgtagccgagtggatctcctctaatagcagaagccaggcttataaggttacatgctctgtaaggcagtcttccgcacaaaatagaaagtacacaatcaaggtcgaagtgcccaaggttgctacacagaccgttggtggagaggagttgccagtggctgggtggcgctcctacctgaatatggagttaacaatccccattttcgctaccaattcagactgtgaactcattgtcaaagctatgcaaggtcttcttaaggatggtaacccaattccaagtgcaattgctgctaattcaggcatttattctggcggcagcagcggcggctcaagcggaagtgaaacacctggaacttccgaaagcgctacgcctgaatcttctggtggatcttctggcggatcttccgcatgcgtcgactcagggactcggcagaagattcaagtacccctggcttttcccaccgcccagagatctgaagctccgaagagagtgcgcgagggaacagagccccctacagcgaccagaccccctgaaaggcccgcacggactgatcgggtgatggaggagggagtcgaacgtgctaacttgaaggctgccttgcagagagtaaaagccaataaaggcagtcccggaatagatgggatgacagtgcagcaggtgccaggctatcttgcggctcactggccagccctgagagagcagctcctccgggggacttaccaaccccagcctgtgaagcgcgtggaaatcgagaagccaggtggaggcgtgcgtaagctcggcgtgccaactgtgctggataggtttctccagcaggcagtgctccaggtcctgcagcgggactgggacagaaccttctctccacatagctacgggtttcggccgcatagatctgcacacaaggccgtcgcgcaggcacagcaatatctggctgacggttgtgggtgggtagtggatctcgatgtggaaaagttctttgatcgagtgaatcacgaccaaagaatggggcaaggtgccaaaaggattacagatcagagaatgcttcggctcctgagagcattcttaaccgcaggagtactcgccgacggcctggtgtcacccactgaagagggaacaccacaagggggaccacttagcccccttctcagtaatctcgtattagacaccctggatagagaggtggagaggcgcggccatagattcgtgcggtatgccgatgactgcaatatttatgtgcgatcacaaagggccggacagcgggtcatggccagcttaacacgttttattacaactactcttaaactgaaggtgaactccgccaaaagcgcggtagctcccccaggcgagaggacttttcttggcttctcatttaccaggacgccacaacccaaacgacggttggccccatccaccgttacacgcggaaaagcccgagtccgggagctgactcggaggactcgaggagtttcattggaacgaatggtaagacagttgagatcatatctgcagggttggagaaattacttcgggttttgtcagactcccagcgtcctcacccatctggatgaatggattagaaggaggctgcgaagcgtcgcttggaaacaatggaagcgtgggagaactaggttcgccgaactgcgcagaagaggcgtgggtttggcgctcgcaactactactgccgggagcgctcacggcccctggcggctttcccatagtagagccctggatttagctctccccaaggcattcttcgcgactctcggccttcctgaattagctgccggccgcgatatctga

SEQ ID NO: 1742 - DNA, 1962 bp, synthetic construct
  source 1..1962: mol_type = other DNA; note = FH-MCP-MG153-99
atggactacaaagacgatgacgacaagtacccctatgatgtacctgattatgctgccagcaatttcacacagttcgtccttgtagacaacggcggcaccggggatgttacagtggccccgagcaatttcgcaaacggcgtagccgagtggatctcctctaatagcagaagccaggcttataaggttacatgctctgtaaggcagtcttccgcacaaaatagaaagtacacaatcaaggtcgaagtgcccaaggttgctacacagaccgttggtggagaggagttgccagtggctgggtggcgctcctacctgaatatggagttaacaatccccattttcgctaccaattcagactgtgaactcattgtcaaagctatgcaaggtcttcttaaggatggtaacccaattccaagtgcaattgctgctaattcaggcatttattctggcggcagcagcggcggctcaagcggaagtgaaacacctggaacttccgaaagcgctacgcctgaatcttctggtggatcttctggcggatcttccgcatgcgtcgacagcaagaaaaacgaaccgtctaaaaccagcgccaacgcagttcaaactgagctgttcacaggtaggctcgactcaggactgcccaagggtgggggcacgtcccgacgagaccagagaatggaattgtttagcagactggaggagcaaagaaccctcacaaaatctaccatggactctgtttctgacaccttgcacctgctgcacgccttcaagcgcgtaagagaaaatgggggtagtgccggtatcgacggagtgaccccgaacgattatgcccagaatctggcattgaggattaattcattgcagcagcgtctcgattctggcacatacgagccaagtgctgtaagaggcgtggaaattgaaaagcctactgggggtacgcggcttctgggtattccaacggttgaagatcggattgttcaacagtctatccagaatgagcttcagcggatattcgacccatatttcagcgagaacagcttcggctttcgacctggccgttcagctcaccaggcaatcgagcgtgcgtccgactatgtgaaggaaggaaagatctgggtggtggacattgatctgaagtcattcttcgatcagattaaccacgacaggctgatgaatagactgagaaattccatctctgacaagcgactgctcaagctgatacataagttcctcagagctggcctcatgaagggtggactggaaacacagcgaatgagtggcacaccacagggtggccccctgtctccattactcagcaacattgtgctggacgaactggacaaggaacttgaagctaggggactgagttttgtgaggtatgctgacgattgcaacattctggtgtccagcgagcggtctgcccaccgggtcttcgagtcaatggtcgcctttattgaaggaaagctgaaattaaaagtcaatctggagaaatccggtgtaagacgctgcgacgaagtgaaatttctgggccacacagtgatgggggacggcaagattcgcatcgcagacaagagtatcgaacgctttaagaaaaaaatcagggaggtgaccaaacgtaatcgggctatccctctgggcaggttaatttctgagactaatctgattattcaaggttgggccacctattttaggaaatgcaatacgtggttgtccgggctcaaagagatggacggttggataaggaatcgaatccggtgttacgccctgaagtctcacggtagaaggtaccccacctattgcttccttcgctcattgggagtggaaacaaagaggtcatggaacgcagttaagtttcatgggtggtggagcatggcgaacctgaactatgttaggaacggcatgggacttgcatggttcgctggcctgggcctgcggtccttggtggttgtgcagaagggagatatctga

SEQ ID NO: 1743 - DNA, 1869 bp, synthetic construct
  source 1..1869: mol_type = other DNA; note = FH-MCP-MG153-100
atggactacaaagacgatgacgacaagtacccctatgatgtacctgattatgctgccagcaatttcacacagttcgtccttgtagacaacggcggcaccggggatgttacagtggccccgagcaatttcgcaaacggcgtagccgagtggatctcctctaatagcagaagccaggcttataaggttacatgctctgtaaggcagtcttccgcacaaaatagaaagtacacaatcaaggtcgaagtgcccaaggttgctacacagaccgttggtggagaggagttgccagtggctgggtggcgctcctacctgaatatggagttaacaatccccattttcgctaccaattcagactgtgaactcattgtcaaagctatgcaaggtcttcttaaggatggtaacccaattccaagtgcaattgctgctaattcaggcatttattctggcggcagcagcggcggctcaagcggaagtgaaacacctggaacttccgaaagcgctacgcctgaatcttctggtggatcttctggcggatcttccgcatgcgtcgactctgcgacaaaccgaaccgggaacaataaagatgagagccacaagccaactaaacttatggaacagattgtatccaaagaaaacatgaccagagcttacaaaagggtgttctctaacaagggagtgtccggtgtggacggcctcgaggtgccggagcttaaggattatctgaaacaacactggtctactattaaggaagctctgctcgctggggagtactaccctcagcccgtcatgcaggtactcatccctaaacccgggggaggagaacggctgttgggtatccctacagtcatcgatcgcatgatccaacagggaatccatcagattctcaatccactttacgatcccggcttttccgattggagttacggatttagggagggctgtaatgcccaacaggcagtggctcaaagtcagatccatattcgtagtggcaagagatgggttgtggatatggacctctcaaaatttttcgacgaggtcccccacgatagactgctgtctaaactcagaaaaaaagtcatggacaggcgtgtcatccaccttattgaccggtatctgagatcaggaatcatgcggtatggcgtggaggagcagaggacaaagggaaccccccagggctctcctttgagtccgatgttgagcaacatcgtgctcaatgaactcgacaaagaactggagaagcgcggacatcgcttcgtgcgttatgctgacgatttccagatttatgtgggatctaagcggaccgcagaacgtgtgatggagtcccttaccgagtttatcgaaaggaagcttaaattgaaagttaataaaacaaagtcagccattgggcgaccttggaagcgttcctttcttggctactctttcacctcccaaaaagagtcaaagcttcgcgtgagtccggagtctatcaaaagattcaaaggtaagctgaaggagaaatttaggctgggaagggggcggaatcagcaggatttcatcgtgaaggatctgaacccgttattgaggggctggattagttacttttcaagatccgaagtcaagggcttcgctgaaatcttggacggctgggtgaggcggcacctgcgtaaaattaagtggttgcaaatgaaaaggtcttggacgcggctccagactttgatgaaacgcggcctgtccgaagatcgggctgtgcaatcatgtttcaaccagcgaggatcctggtggaacagtggcgcatcacatatgaacaaggcctacccgcgaagttattttgatcagttagggctgatctgtctgcaaaataagctcagtggctatcatctggatatctga

SEQ ID NO: 1744 - DNA, 1803 bp, synthetic construct
  source 1..1803: mol_type = other DNA; note = FH-MCP-MG153-101
atggactacaaagacgatgacgacaagtacccctatgatgtacctgattatgctgccagcaatttcacacagttcgtccttgtagacaacggcggcaccggggatgttacagtggccccgagcaatttcgcaaacggcgtagccgagtggatctcctctaatagcagaagccaggcttataaggttacatgctctgtaaggcagtcttccgcacaaaatagaaagtacacaatcaaggtcgaagtgcccaaggttgctacacagaccgttggtggagaggagttgccagtggctgggtggcgctcctacctgaatatggagttaacaatccccattttcgctaccaattcagactgtgaactcattgtcaaagctatgcaaggtcttcttaaggatggtaacccaattccaagtgcaattgctgctaattcaggcatttattctggcggcagcagcggcggctcaagcggaagtgaaacacctggaacttccgaaagcgctacgcctgaatcttctggtggatcttctggcggatcttccgcatgcgtcgacaaactcgcattggagcggggggttacaactatggacttgatgaatgtagttctttcacaggacaacattcacagggcatatctgaaagtcaaggccaataagggcgcctccggtgtcgataatcagtctgtcgatgagttgggagattatctcaagatcaatggcgataaagtgatcaacgatattagaactaaacgctactttcccaaaccggtgaagcgcgtgtatattcccaaagctaatgggcgcaagagaccactgggcattagtactgtgctcgatcggatgatacagcaggcagtcgcccagcctattacagacatctatgagagggtcttctccgattattcatttggatttcgccccggccggtcatgtcatgatgccactaaacaggccctggaatacctcaacgggggttacgaatgggtgatcgatatagacattgagcaattttttgataaggtgaatcacgataaactgattcaggtgctgagggaacaagttaatgatagtgacgtgttgaatctgattaggaaatatttgaaggccggggtgatggagaagggactcgagaaagctactaaaactggcgtgccccagggaggaccaatctcagtgatcctcagtaacgtgtatcttcatgagttggacaaggagctggaaagcaggggactgcgctttgttagatacgccgacgatgtattaattttcacaaggagcgagatggcagccaatagggtgatgacctcaatcagcagctggttggagcgtaagctcttcctgaaggtgaatgcaactaaaagtaaagtctgcagacccactcgtagcaaatatctcggcttcacattcttgaaacatggggggcagtggaaggtgaaaccaaccagcaaatccaaagcaagactctacgagaaaatgcgggagtacctgaagcggaatcgagcggtggccagacccttgtctgtaacatttaagaaggtgaactctgttgtgcgcggctggatcaactattacaggatcggcatgatgaagggacttatgaagatcaatatgaaataccggagcggctttagccacgaagacatctttaaagtggcaaatagccgcctcggatggtacaagcgttgtgggcaaagcgtcgtgaacttcgtactcaatcccaagttgctcgaagctaagatcaaagaccgtgtggggttacttaatcctctggattactacctccgtaaagttgggatcgatatctga

SEQ ID NO: 1745 - DNA, 1968 bp, synthetic construct
  source 1..1968: mol_type = other DNA; note = FH-MCP-MG153-102
atggactacaaagacgatgacgacaagtacccctatgatgtacctgattatgctgccagcaatttcacacagttcgtccttgtagacaacggcggcaccggggatgttacagtggccccgagcaatttcgcaaacggcgtagccgagtggatctcctctaatagcagaagccaggcttataaggttacatgctctgtaaggcagtcttccgcacaaaatagaaagtacacaatcaaggtcgaagtgcccaaggttgctacacagaccgttggtggagaggagttgccagtggctgggtggcgctcctacctgaatatggagttaacaatccccattttcgctaccaattcagactgtgaactcattgtcaaagctatgcaaggtcttcttaaggatggtaacccaattccaagtgcaattgctgctaattcaggcatttattctggcggcagcagcggcggctcaagcggaagtgaaacacctggaacttccgaaagcgctacgcctgaatcttctggtggatcttctggcggatcttccgcatgcgtcgacaacgtaaccaagcagaagtacaaggggcgcaagtttcataatgagaactgccctcaaaaggtggccgccgaacagcggggttatgctggggttccagcgagtgtccgtatcgctgagacatctgatattataacagacttaccaaccgactcattactgaagcggataatcagtagagataatatgaatacagcatacttcaaagtgaaaagcaaccggggagccggcggggttgataagatgagcgtagatgaactgttgccatacctgcgggaacatcgtcttagtctgcttcagcagatacgggatggcaaatataagccaaaccccgtgaggagagtcgagattcctaaagaagagaggggcaagacacgtaagttgggaatcccaactgtagtggatagggtgatacagcaggccatcgctcagattctcactccaatatatgaaccacaattttccgaggctagttttgggtttaggccaaagaggggagcgcacgacgccttaaaaacatgtcaaagatacgccgatgaggggtacgtgtatgtggtcgatatggatttggagaaatttttcgataccgtatgccagagcaagctcatagaaatcttgagtagatcaattaaggacgggcgggtgatcagcctgattcataaatacctgaacgcaggagttatccgccagggcgtgtttgaacggagtgagcagggcgtgccccagggtgggcctttgtctcccctcctttctaatgtgatgctgaacgaacttgacaaggagctggagagaaggggacataaatttgtacgctacgctgacgactgtatgattttgtgcaaaagccgcaggagtgcagagaggacccttgcgtcaatcatcccattcatagaaaaaaaattgttcttgaaggtaaatagggagaagaccagcgtcgcacatatcagcaaagtgaagtatttaggctatggattttataggtacaagggtaagtgccgcttcaaggtgcacaagaagagtcttgctaagatgaagaaaagactgagagctatcactaatcgcagcaaggcaattagtaacgaagaacgaccactgatcctcaaacgatttgttaaggggtgggtgaactatttcaaacttgcagatatgaaaaacatgttgagacaattagacgagtggctgtggagacggatacgggccatttattggaagcagtggaaaaaggtgaaaactcgatgtcgaatgattcggcggtataatctgcccgactggaaagtccatgaactggccaactgccgcaaaggcatctggcgcgctgctctcatgcttaaccaaatcctgaccaataaagaaatcgcgcggcaaggctatatcagcctgactagctattatgagcaggtgtgcgaaaatgatatctga

SEQ ID NO: 1746 - DNA, 1959 bp, synthetic construct
  source 1..1959: mol_type = other DNA; note = FH-MCP-MG153-103
atggactacaaagacgatgacgacaagtacccctatgatgtacctgattatgctgccagcaatttcacacagttcgtccttgtagacaacggcggcaccggggatgttacagtggccccgagcaatttcgcaaacggcgtagccgagtggatctcctctaatagcagaagccaggcttataaggttacatgctctgtaaggcagtcttccgcacaaaatagaaagtacacaatcaaggtcgaagtgcccaaggttgctacacagaccgttggtggagaggagttgccagtggctgggtggcgctcctacctgaatatggagttaacaatccccattttcgctaccaattcagactgtgaactcattgtcaaagctatgcaaggtcttcttaaggatggtaacccaattccaagtgcaattgctgctaattcaggcatttattctggcggcagcagcggcggctcaagcggaagtgaaacacctggaacttccgaaagcgctacgcctgaatcttctggtggatcttctggcggatcttccgcatgcgtcgacaaaggcagaaaacagaagactcctaagaacatcggtgggtatcaccaggaggtgggtgccgagcaccgggggaacgatggcgtacctacgtttgtctggattaccgagaacaatgaggtcacacctccactcgaggacggacttctcggaaaaatcctgaacccattcaacctgaacagggcatacttaaaagtggtgcgcaacaagggcagccatggtatagataagatggaagtgggagtcttaagggattatttgagacaccacggctccgaattgatcacctcaatcaacagtggaagttatcatcctaagcctgttagacgtgttgagatcccgaaagataagacctctaaaaggccccttggcattccgaccgtggtggacaggtttatacagcaggccgtgcatcaagtccttagtccgatctacgaaaatcagttttcagataattcctttggcttcaggcccaagaggtctacacacaaagccttacatcgatgcaagaggtttatctcagaaggtaataagtatgcaattgacatggacatggagaaattcttcgataccgtgaatcactctaagttaattgagatcttatcaaggacgatcgatgattccagagtactttctttgatacacaaatacctgaacgccggagtggtagttgaacataaattcgaagctacggagagaggcgtgccacaagggggtcccttgtctcccctcctgtcaaatataattctgaatgaactggacaaggatttgactaggcgtgggcatcgctttgtgcgttatgcggacgatatggtgattctttgcaaaagcaggcggggcgcagaacgtgttaaggagagtgtgattcggttcattgaacaacgcctgttccttaaggtcaatcgggaaaaaacccaggtcgttcatttttctcgcataaaattcctcggctactccttctataacaaaaagggcgaggtgcgctttcggattcatcccaaaagtatcgcaaaactcagggataaaataagggttctcactagccgaagtaacggatggggatactcagttagaaaagagcgcctgtccgccttcattaaagggtgggtaaattacttccgttacacagacatcaagaacctcctgataaagattgatgaatggtacagacgtcggctgcggatggtcatttggaaacagtggaaactcgtccgcactcggtctaggaacttgaccaagctgggtataccgaagaggaaggcctgggaatgggcaaacactcggaagggctattggcacgtgtcaaattcttatattttgtctcgcagcattacaaacaaaaatctgagctctgccggctacctgtttttcacagactattatctgaaagtaagggtcatagatatctga

SEQ ID NO: 1747 - DNA, 1899 bp, synthetic construct
  source 1..1899: mol_type = other DNA; note = FH-MCP-MG153-105
atggactacaaagacgatgacgacaagtacccctatgatgtacctgattatgctgccagcaatttcacacagttcgtccttgtagacaacggcggcaccggggatgttacagtggccccgagcaatttcgcaaacggcgtagccgagtggatctcctctaatagcagaagccaggcttataaggttacatgctctgtaaggcagtcttccgcacaaaatagaaagtacacaatcaaggtcgaagtgcccaaggttgctacacagaccgttggtggagaggagttgccagtggctgggtggcgctcctacctgaatatggagttaacaatccccattttcgctaccaattcagactgtgaactcattgtcaaagctatgcaaggtcttcttaaggatggtaacccaattccaagtgcaattgctgctaattcaggcatttattctggcggcagcagcggcggctcaagcggaagtgaaacacctggaacttccgaaagcgctacgcctgaatcttctggtggatcttctggcggatcttccgcatgcgtcgacaagaagaagccaacaatgaagtcaaagatgcgccagctcaatctgtttgtagatgagcgaagtctgttcgaaaaattatgtgaccctattaacctgggcgccggctttaaggcggtgaaaaaaaacggcggcagcccagggattgatggcgtcaccatcaaagagttcgataataggctgaaagaggaactggttcagctggaacgggacatcgaaagctggaactataagccatcacctgtgcgccgtgtggagatcccaaagcctggtaaagggaagggcgtgaggttactcggagtgccatgcactcgagatcgtgtcgtccaggcgaccattaagttactcttggagcccatattagaccccacgttctccaatcacagctacggatttcggccgggatacaaccagtggcaagccgttgaatccgcccagagaatcgtgaaatccggcaaagagtacgttgtggacatagacctgagcaagttcttcgatcgcgtcaaccatgaccgcctcatttacctcctcagcgggcacatcgacgacaagcagattttacgactgattggtatgatcttgcgatcagggatcatgaaagacggcatggtgacaccatccgaggaagggactccccaaggaagccctctgtctcctctgctcagtaacgtggtgttagacgagttagacaaggagctggagcggcggggcctcgagttttgtcggttcgccgacgactgtaatatctttgtccggactccaaagtctgccgaacgcgtcatgagatctataggtaaattcatcgaaagaaaattgaagcttcggattaacagagacaagagtaaagtagggagatctcgcgaagttaagtttttgggaatgacaattatagatggggccgtagtgatttccgctcaatctatgaagcgggctttggagaaagtaaaggaattgacccctcgggggacacaccttagcctgagcgaaacaatgaagagaattaactcatggtacataggttggagcgggtactaccgtatgacacagtacccatcccaattgagggcgatagaagcccatattcgacggagacttaggagtaggatagttgaccagcacactagacggaggcacctctttaaaaaattaataaagcgtggtgtgactagacggagagccagaacagttttttctaataaaggacgatgggttctgtctaatatctttgccttaactgaagccttccccgtcaggtggttcctggatcaagcaggacagaagatacgaagcgatgacaggttaaggcactggttccctatacatctctggattaaggtgacggatatctga

SEQ ID NO: 1748 - DNA, 1947 bp, synthetic construct
  source 1..1947: mol_type = other DNA; note = FH-MCP-MG153-106
atggactacaaagacgatgacgacaagtacccctatgatgtacctgattatgctgccagcaatttcacacagttcgtccttgtagacaacggcggcaccggggatgttacagtggccccgagcaatttcgcaaacggcgtagccgagtggatctcctctaatagcagaagccaggcttataaggttacatgctctgtaaggcagtcttccgcacaaaatagaaagtacacaatcaaggtcgaagtgcccaaggttgctacacagaccgttggtggagaggagttgccagtggctgggtggcgctcctacctgaatatggagttaacaatccccattttcgctaccaattcagactgtgaactcattgtcaaagctatgcaaggtcttcttaaggatggtaacccaattccaagtgcaattgctgctaattcaggcatttattctggcggcagcagcggcggctcaagcggaagtgaaacacctggaacttccgaaagcgctacgcctgaatcttctggtggatcttctggcggatcttccgcatgcgtcgacgatcgaaataatgaaaaacctagttgtggtcagagagcccggaatgccgcgaagccagcccagaagggcccccccgcaagcattgagactgaggaggacactcataacctcaacctgtacgccggcatcacacttgaggccattctggagccttcaaaccttaaggaggctctcaaaagagtcgtagcaaataggggcgcacccggcatcgatggcatggaagtgggacagctgttagactggattcggaatcaccctggtcagttaactaaagctattaaggagggaacctataggcctagccctgtgaaaagggtttccatcccgaaagacgagcccggtaagtttagggacctgggcatccccactgtcattgataggcttgttcaacaggctaccgcccaagttctggactgggcttatgaccgagattttagtgatcgatccttcggattccggcgaaacatgcgagcccatcacgctctgagagttaccgccgccgaagctgatcaggggtacagatgggctgtcgatatggatctggccaaattttttgacaccgtgaaccactctcgtctgattcgcaagctgtctttgaaaattaaggatggcagggtgatctctcttattcacaaaatgttaagatctggtgttcagatcaatggggagacaaagccaactgagataggcctgatgcaaggcggcccactttcaccccttttggctaatatatacctggatgaactggataaagaattagagaaacggggacataggtttgctcggtacgccgatgacctgatttgtatctgcaaatccagaagagccgcggagaggacacttgctagtctcacccgattcgtgcaggataaaatgcttctgaaggtgaaccaggaaaaatctcacgtctcacttgttaccagtagtagaacaaagtttctgggttatggtttttacttttccagagctaaaggagaggtacgcctgacaattcataaaaagagtaaacagaaactgaaggatacgatcaggcagctgctgactcgtaatcctagaacatctattgaaaacgtcaagcagttgctcgcccagaaacttcgaggctggatgaactattttcagctggccgatgctcagagatggactcaggaggtagatcgatggatccggcgcagaatcagacagttgctctggaagacgtggaagaaagtcaaaacaaggataaaggcactgatcaaactgggggctgatcctgcaagagcgtattactggggctgtactaggaagggctactggcgaatttcaaacagccatatactggcaacaacacttaccacggattttttgaagagaagaggctggtcatggctcggctgttacaagggggatatctga

SEQ ID NO: 1749 - DNA, 1839 bp, synthetic construct
  source 1..1839: mol_type = other DNA; note = FH-MCP-MG153-107
atggactacaaagacgatgacgacaagtacccctatgatgtacctgattatgctgccagcaatttcacacagttcgtccttgtagacaacggcggcaccggggatgttacagtggccccgagcaatttcgcaaacggcgtagccgagtggatctcctctaatagcagaagccaggcttataaggttacatgctctgtaaggcagtcttccgcacaaaatagaaagtacacaatcaaggtcgaagtgcccaaggttgctacacagaccgttggtggagaggagttgccagtggctgggtggcgctcctacctgaatatggagttaacaatccccattttcgctaccaattcagactgtgaactcattgtcaaagctatgcaaggtcttcttaaggatggtaacccaattccaagtgcaattgctgctaattcaggcatttattctggcggcagcagcggcggctcaagcggaagtgaaacacctggaacttccgaaagcgctacgcctgaatcttctggtggatcttctggcggatcttccgcatgcgtcgacgtcacgttggaggccattctcgaatccacgaacttaaatcaggcttggaaacgtgtggtcgcaaataaagggtcagccggcgtcgatggcatggaagtcaaggatttgtatgcacaccttcttgagcacggccctgagcttgtgcagcccatcaaggaagggcgatacaagcctcagcctgtcttaagagtgttgatccctaaagaggagaaaggcaagttccgtcctctcggaatccccactgcaatcgataggtgggttcagcaggctgtacagcagaaactgtcagaagaatatgagaaggtgttctcagaaagctctcatggattcaggccaaacaggagttgccagactgctgtagagcagtgtctgaagcttgcaaatgagggctatgtatgggtggtggaccttgatctggctaaattctttgaaaccgtgaaccatagcaagctgttgcagctcctttctgagcgaattaaggacgggagggtgattagtctgatacacaaattcctgagggctccggttctggaggatggaaagagtacccctaataccatagggacccctcaaggcggacccatcagccccatccttgctaacattatgctgaacgagcttgacaaaaaactggaggagaggggccacccattcgtgagatatgctgatgatatgatgatcttttgtaaatctaggaaatccgccgaaaggaccctggctaacatcaagcctttcattgagaagaaactgttcctgaaactcaacgaagaaaagacaaaaattaggtatattggctcaagtgacgtgaagtttctggggtttgggttttacgccgagaaagacggaaaaataaaagataagccgcaccaaaaaagtaaagacaaatgtgtcaaaaggttgcgggagataacctcacggtccagaggccaatcactggacgcctttcgaaaacagctgagtgaatttgtacgtggttgggtaaactatttcctcagaagcgatatggctatctttgttcgcgacaccgacaagtggctgaggaggcgtattcgacaaatctactggaaacagtggaagaaaatttccaccaaatacgaggcactgatgcggttgggcgtatccccttcccttgcctggcaacacgctaatacccgtaaatcatattggaggactgctcactcatggattctggcgaccaccttgactaacggcttcctgcatcgcaaagggtgggtgtgtctgggcgatgtgtacaagaaacgcacccagggcagttatgatatctga

SEQ ID NO: 1750 - DNA, 1833 bp, synthetic construct
  source 1..1833: mol_type = other DNA; note = FH-MCP-MG153-108
atggactacaaagacgatgacgacaagtacccctatgatgtacctgattatgctgccagcaatttcacacagttcgtccttgtagacaacggcggcaccggggatgttacagtggccccgagcaatttcgcaaacggcgtagccgagtggatctcctctaatagcagaagccaggcttataaggttacatgctctgtaaggcagtcttccgcacaaaatagaaagtacacaatcaaggtcgaagtgcccaaggttgctacacagaccgttggtggagaggagttgccagtggctgggtggcgctcctacctgaatatggagttaacaatccccattttcgctaccaattcagactgtgaactcattgtcaaagctatgcaaggtcttcttaaggatggtaacccaattccaagtgcaattgctgctaattcaggcatttattctggcggcagcagcggcggctcaagcggaagtgaaacacctggaacttccgaaagcgctacgcctgaatcttctggtggatcttctggcggatcttccgcatgcgtcgacgaggaacagggtattttcatagaaaggatcctgtcaaatgagaacatgaacagagcctataagcaggttaaaaagaataaaggcgctgcaggcatagacggaatggagtgtgccgacctgctctcccatctgaaggtgaacggacagcagttacgagagtcaattcggaaccaaagttataagcccatgccagtgaagcgggtcgaaataccaaaggctgacgggagcaaaaggaaactgggcattccgactgtcaccgatcgcatggtgcaacaggcggcagcgcaagttctcacaccgataaacgaacgtaaattccacgaaaattcatatggcttcaggccaggcaagagcgcccaaaaagcggtcctgaaggcagtcgagtacatgaacgagggctacaattgggttgttgatattgacctcgaaaagttctttgacacagtggagcatgataagctgataagcgtgctgaataaagagatcaaagacggaaaaatcctcagtttaattcggaagttcctcgtttcaggagttatggtaggcgaacaaattgaggagaccgagatcgggacaccacagggaggcaatataagtccccttctcgccaatattcttttaaacgagcttgattgggaactggaaagccgtggcctgaaattcgctagatacgctgacgattgcattatttttgtgaaatctgaaaaggcagcggctcgggtgatggaatctgtaacaaaatatgttgaaaatgtcttgcgacttaaagtaaatcgtggcaaatccaaaatagggcggcccacagaaattcagtatttgggtttcgcattttattatcagtttcaggaaaaaaaatataaaattaaagtgcctaagaaaagtttagataaagtcatgaagaaggtccggaaactcaccagccggaagtggggagtttcaaattcctataaagcacagaagattgctgaagtggtacggggctggatcaattatttcaagatcggctctattctgacagccacccggagactcgatacggtaatcaggtaccgctttcgaatgtgcatttggaagcactggaaaaatccaaagacacgctataaaaacctggtgaaattgggtgtctcaaagaaaaacgcgaagtctgctgctggattccatggttacgtccgcgtctgtcgaaccgaaacaatttgttatgcaatgagtaatgccagacttaagaagtttggtttgctttcagctgaagaatacttttgtcagacccggtgtgatatctga

SEQ ID NO: 1751 - DNA, 1950 bp, synthetic construct
  source 1..1950: mol_type = other DNA; note = FH-MCP-MG153-109
atggactacaaagacgatgacgacaagtacccctatgatgtacctgattatgctgccagcaatttcacacagttcgtccttgtagacaacggcggcaccggggatgttacagtggccccgagcaatttcgcaaacggcgtagccgagtggatctcctctaatagcagaagccaggcttataaggttacatgctctgtaaggcagtcttccgcacaaaatagaaagtacacaatcaaggtcgaagtgcccaaggttgctacacagaccgttggtggagaggagttgccagtggctgggtggcgctcctacctgaatatggagttaacaatccccattttcgctaccaattcagactgtgaactcattgtcaaagctatgcaaggtcttcttaaggatggtaacccaattccaagtgcaattgctgctaattcaggcatttattctggcggcagcagcggcggctcaagcggaagtgaaacacctggaacttccgaaagcgctacgcctgaatcttctggtggatcttctggcggatcttccgcatgcgtcgacaaagcagaaaatagaggaaatgaaggctttttgcaacgtgagtccgtggaacaccagggatataccgaagctcggagcacagacagatctgagggcaaagagagagatggggccagtgatcttctggaagctattctcgaccgtgataacctgaatagagcctacaagagggtaaaatctaatcatggagcggccgggattgatggcatgagcgtagaagaggccctgccctggctcaaggaacacagggaggaactgctgcagagcattcgggacgggtcatatgagccatctcccgtccgcagaaaagagataccgaagccagatgggggcgtgcgaaaactgggcattccgaccgtcgttgatcgcgttatccaacagggaattgctcaaaagttgcagaacatatgggagcctcagttcagcgattctagttacggatacagacctaagcggagcggacagcaggcgattcagaaggtgaaggagtatgcagaggctgggtatagatacgcagtgtctgtggacctgtccaagtatttcgatacactcaatcatgaactcctgatgaacttgttacataggaaaattcaagacatgagaatccttagaatcattaaaaagtaccttaagagcggagtcatggaaaatggcgttgtgagcaagactgaggagggcagtccccaaggaggccccctgagcccattacttgctaacatttacctgaacgagtttgattgggaaatgcactcccgaggtgtaaagacggtcaggtatgcagatgacatcgtagtcttcgcaaagtccaagcgagccgcagagagactgatggagagttctcggaaatacttagaagggaagctcaaattgaaaatgaacactgagaaatccaaggttacttctatttttgccgtgaaagagttcaaatttctcggcttttgcattggccggaatgggtccggaatatatattagagcgcacaggaagtccctcaataaggctaaggaaaaactgaagcttttgacagaaaggaacagaggtagaaacgtgaggcgagtcatgcaggaggtaaaggtttatatctgtggctggctcggctacttccacgtagccgatatgaaacgtaccatgaagtcctgggatgagtggctgagaaggcggttcagaatgtacatctggaagcagtggaaaaagcctagaacaaaagtcgccaacctcaggaaactggggatcccggcagataaagcgtaccagtggggcaactcaaggctgggctattggcgaatagccggatctccagtcttagcttgttccatcacaaacgagcgcctggctgctgcaggctacttttctattctgaattgttatgagtctctgcactcctgtgacgatatctga

SEQ ID NO: 1752 - DNA, 1839 bp, synthetic construct
  source 1..1839: mol_type = other DNA; note = FH-MCP-MG153-110
atggactacaaagacgatgacgacaagtacccctatgatgtacctgattatgctgccagcaatttcacacagttcgtccttgtagacaacggcggcaccggggatgttacagtggccccgagcaatttcgcaaacggcgtagccgagtggatctcctctaatagcagaagccaggcttataaggttacatgctctgtaaggcagtcttccgcacaaaatagaaagtacacaatcaaggtcgaagtgcccaaggttgctacacagaccgttggtggagaggagttgccagtggctgggtggcgctcctacctgaatatggagttaacaatccccattttcgctaccaattcagactgtgaactcattgtcaaagctatgcaaggtcttcttaaggatggtaacccaattccaagtgcaattgctgctaattcaggcatttattctggcggcagcagcggcggctcaagcggaagtgaaacacctggaacttccgaaagcgctacgcctgaatcttctggtggatcttctggcggatcttccgcatgcgtcgacgcaaaaagccactggacaaaggcagagcctcgtgggtgtagtcttatagatcttgtctgcttttatcttgatgatgctgcccaaaaagtgatcaagaataagggggcaccggggattgacgggattacatatgagcaactgccaaacctgctccgcgtccacggcgagaagattcggcagaaactcaagaacgggacatatataccagctccagtcagaagggtggacatccctaaacccaacgaaggcacaaggatgcttggaatcccaaccctgctggaccgtacaattcagcaggctatcgtcatgaccattggggacgccttcgaggggcaattcagcgataagagttacgggtttcgggaaggacgtaattgcagacaggctgtccaacgcgcacaggagtatattaaagacggtaatagatgggttgtcgaaatggacctcagcaagttctttgatagagtgaatcacgacatactgatggacagggtcagccgagtgatagacgacaaggcgatcctgaagctgattagacgctacttgaatgccgggatcatggaggatggcttggtgagtcctcggctggaaggggtgcctcaaggcagccctttgagtccactgttatccaatatcatgctgactgatctggaccgagaactcgaagcaagaggactgaatcacgtcagatatgcggatgattgtaacatatacgtgcggagcgaaaaagccgcccagcgtgtgctgacaaatatcacgaaatatgttgaagagaccctcaaactcagagtgaatcgtgataaatctgggacatttaggccaagggatagcgtcttccttggttacacattcagcaaggctaattgcacacgaatcatagtcgcacagaagagcgtgaagcgcctctggactaaacttcacaaaatctttaataccgcccgaggtacaagtttggggtgggccatcaaaactatcactccagtcctgcgggggtggcggaactactatagactggacgacagaaagaaatactgggaggagatggatgagagaattagacaccatttacggaagttgatttggatcgcttggaagaagcctaaaacacgggagcggaaccttgtaaagctgggcattgatcctgagagagcatggaaatctagcgtgaacgggaggggggcttggtggaactcaggccagtcccacatgaatcaggccatcaaaaatgacaggtttgtcagattggggctctattctttgcggttcatggaaatccgcgatatctga

SEQ ID NO: 1753 - DNA, 1797 bp, synthetic construct
  source 1..1797: mol_type = other DNA; note = FH-MCP-MG153-111
atggactacaaagacgatgacgacaagtacccctatgatgtacctgattatgctgccagcaatttcacacagttcgtccttgtagacaacggcggcaccggggatgttacagtggccccgagcaatttcgcaaacggcgtagccgagtggatctcctctaatagcagaagccaggcttataaggttacatgctctgtaaggcagtcttccgcacaaaatagaaagtacacaatcaaggtcgaagtgcccaaggttgctacacagaccgttggtggagaggagttgccagtggctgggtggcgctcctacctgaatatggagttaacaatccccattttcgctaccaattcagactgtgaactcattgtcaaagctatgcaaggtcttcttaaggatggtaacccaattccaagtgcaattgctgctaattcaggcatttattctggcggcagcagcggcggctcaagcggaagtgaaacacctggaacttccgaaagcgctacgcctgaatcttctggtggatcttctggcggatcttccgcatgcgtcgacatcacattagaagaggtactgagcccagagaatatgcagaccgcatgtaaacgcgttatcgcaaacaaaggggcacccggcgtagacgggatgtctgtgaatgaggtcagagcccactttgaaaaacacggggccagcatttgcgctcacatccgggaagggcgctatattccagccgccgtaaaacgcgtggatatacccaagcccaatggcgggactaggatgcttgggattccgaccgtacaggatcgagtaattcagcaggctatcgcccaagttctttcaaaacattttgatccccttttttctgaatttagctacggcttcaggcccggcaagtccgctcaccaggccattgaacaaactcagaaatacatagccgaggggaggacctgggtggtcgaattggacctcgcaaaatttttcgatactgtcaaccatgaccggcttatgtcaaagctcgggcagcacattgaagataagatgctccttcggctcatcagaagatacttgcgcactggcatcatggctgacggagtggttcaggtccgggaggaaggtactccacagggatctcccctctctcctatcctgtcacttatagtgttagacgaactggataaatatcttgacaaacgtgggctgaaatattgcagattcgccgacgactgcaactgctacgcaaaaagtaggaaggcagcagaaagaacattagaaaatatgatttcattcattgagggggcgcttaagctccgcgtcaatcgtgacaaaagcggcgtgttccggcctagcagggctaaattcctgggctataccttcgtaggcacaacaggggccgctcgagttcacgccaaatcactgcagagactccgagataaactgaaggaaatcttctttcgcgcaagaggtacctcccttttgaagaccatagccaaactcaataccgtattaagaggctggcggaactacttccgcctcgatgaacggaagggaattttcgaaagcttagatattcatataagacgtcacctccgaaaactgatctggattgcatggaagaaacctaaaacccgcgagagaaatttagtgaagaggggcctggatccagtccaagcatggaaaagcagtgttaatggacgtggcgcctggtggaacgccggtgcactgcacatgcggcaggcgttcgacaaccagttttttcaaaagatgggattgtatagtctgttggcccaagctgatatctga

SEQ ID NO: 1754 - DNA, 1989 bp, synthetic construct
  source 1..1989: mol_type = other DNA; note = FH-MCP-MG153-112
atggactacaaagacgatgacgacaagtacccctatgatgtacctgattatgctgccagcaatttcacacagttcgtccttgtagacaacggcggcaccggggatgttacagtggccccgagcaatttcgcaaacggcgtagccgagtggatctcctctaatagcagaagccaggcttataaggttacatgctctgtaaggcagtcttccgcacaaaatagaaagtacacaatcaaggtcgaagtgcccaaggttgctacacagaccgttggtggagaggagttgccagtggctgggtggcgctcctacctgaatatggagttaacaatccccattttcgctaccaattcagactgtgaactcattgtcaaagctatgcaaggtcttcttaaggatggtaacccaattccaagtgcaattgctgctaattcaggcatttattctggcggcagcagcggcggctcaagcggaagtgaaacacctggaacttccgaaagcgctacgcctgaatcttctggtggatcttctggcggatcttccgcatgcgtcgacaaaaatgcagagaacgtgagatcctgcctgcagagggattccaccgagtgtgaaggatacgctggggctcaatctgcagtccaacccggcagcggagaaacagctgggcggagccagaatttactggaagcaattttatacagggacaatttaaatagggcatacaaacgcgtgaaggcaaacaaaggcgcaccaggagtggatggcatgacagtagaggaagcattgccatggcttaaagaacatggcaaagagatgactgaagctattagatccggtaaatacaagccgacagcagtccggagaaaggagatccctaaaccagatggcggcgtctgtaagttgggtattcctatggtcaaagatagaatcgtgcagcaagcgatagcccagcagttcatgccattgtatgagccaaagttctctgagggctcatatgggtaccgtccaggtagaagtgcccaggacgcaattttcaagatcagaggttatgctgacgagggctatgaatgggccgtgcagcttgatctgtctaaatacttcgacacactcaatcacgaaaaactgttgaatctgctcagggagactataaaagacgaacgggtaattcagcttatcaagaaattcctgaagtctggggtgatggagaacggagttaagattgctacgacagaagggagcagtcagggggggcctctgagcccattattagctaatgtctacctcaatgagttcgactgtgaatatgagcgccgtggcgtccctgtcattcgctatgctgatgatattgttctgctgtgcaagtctcagagggccgccgaacgcttgcaggaatccagtattcgttaccttgagggaaaattaaaactgagagtcaatcgggacaagagtcacatcgcccgggtcaacgcgactaaaaacttcaagtttctgggatttgcctacggcaagggtaaggatggtctctttatcagggcccatccgaaggcactgctgaaggctaaaaacaggttaagagctatcacaaaaagaaaccggggagtgaacgtccgaaaagtgatgcaggagataaaagtctatatgacagggtggctgaattactatgggattgcctttttgaaaacgaagatgcgtgagtgggacgagtggctcaggcacaggatcagggcatatatttggaaacaatggaaaaaacctaagactaagcggaagaatctcatgaaactgggggtgcctgagtactacgcccatatggcggccaactccaggagggggtattggtttactgtgaacaccggggctgtgacacgcgggatcaccaacgagcgattgacgagggctggattttttgagctgagtcccgcctatgaatcaatccaaacagcttgcataggacgcgccgtgtatcggacagtccggacagtgcgtgatatctga

SEQ ID NO: 1755 - DNA, 1923 bp, synthetic construct
  source 1..1923: mol_type = other DNA; note = FH-MCP-MG153-113
atggactacaaagacgatgacgacaagtacccctatgatgtacctgattatgctgccagcaatttcacacagttcgtccttgtagacaacggcggcaccggggatgttacagtggccccgagcaatttcgcaaacggcgtagccgagtggatctcctctaatagcagaagccaggcttataaggttacatgctctgtaaggcagtcttccgcacaaaatagaaagtacacaatcaaggtcgaagtgcccaaggttgctacacagaccgttggtggagaggagttgccagtggctgggtggcgctcctacctgaatatggagttaacaatccccattttcgctaccaattcagactgtgaactcattgtcaaagctatgcaaggtcttcttaaggatggtaacccaattccaagtgcaattgctgctaattcaggcatttattctggcggcagcagcggcggctcaagcggaagtgaaacacctggaacttccgaaagcgctacgcctgaatcttctggtggatcttctggcggatcttccgcatgcgtcgacaccatgaggggtgccatgagacagatgtctgcatctgccgagcgttcaggtgttggccagggagaggcactgagcgatccgggcagtgacgcagccacacggccgaggcatgagacagaaggcaccggtccaggtctgctcgtggctgtgcttgcgcgagagaacatgcagcaggcgtggaagagggttagggccaataaaggcgccgccggcatagatgggctcgacatcgatcagacggccgagcgcttacgttcaaaatggccctccattcgcgaacaactgctgtgcgggacataccgaccccagcccgtgcgtagagtgacgatcccgaaacctgatgggggcgagcgcgagctggggattccaaccgtaactgatcggttaattcagcaggcactgctgcaagtgttacagcccatattggaccctacttttagccctcattcctatggctttcgccctggccggtctgcacatggggctgtacatgcagcccaggctaatgtacagagtggaagaagggtagtcgtggatgtggatcttgagaagtttttcgacagggtaaatcatgacatcctgattgaccgtgttcagaaacggatcggagacgctggcgtaataaggctcattagggcgtatctcaattccggtattatgatggacggggtcgtccaagagcgagtaatgggtaccccacagggagggcccctctcccccttattggccaacgtgctgttggacgaggttgacaaggaacttgagagacggggtcattcctttgttcggtacgcggatgacgctaacgtgtatgtgagaagtcggagagccgggaagcgggtaatggccttgttgcttaagctctatggacgtctcagactgaaagtcaatgaagccaaaagcgcagtcgcaagcgtattccaaagaaaatttctgggatatagtttttgggctgcacccggcggtgctattaaaaggcgagtagctaacaagcccatcgcaatgtttaagcagcgcgtacgaagactgactcgccgatcaggaggcaggtcccttcaggaggtggtgacaaaactgcgagtctacgttctggggtggaaggcttatttcagattggcacagacaccccgagtctgggaggagctggaccagtggatgcggcaccgtattcgtgccatccagctcaagcactggaaacgtgctaaaactatttaccccgacctcctcgctaggaaagcttcctctactgtggctgcccaggttgcagccaatgctcggcggtggtggcgaaactctggtatgcttcttaactctgttctgaacttagcctgggctgacaggcttggaatccctcggctgtgcgatatctga

SEQ ID NO: 1756 - DNA, 1950 bp, synthetic construct
  source 1..1950: mol_type = other DNA; note = FH-MCP-MG153-114
atggactacaaagacgatgacgacaagtacccctatgatgtacctgattatgctgccagcaatttcacacagttcgtccttgtagacaacggcggcaccggggatgttacagtggccccgagcaatttcgcaaacggcgtagccgagtggatctcctctaatagcagaagccaggcttataaggttacatgctctgtaaggcagtcttccgcacaaaatagaaagtacacaatcaaggtcgaagtgcccaaggttgctacacagaccgttggtggagaggagttgccagtggctgggtggcgctcctacctgaatatggagttaacaatccccattttcgctaccaattcagactgtgaactcattgtcaaagctatgcaaggtcttcttaaggatggtaacccaattccaagtgcaattgctgctaattcaggcatttattctggcggcagcagcggcggctcaagcggaagtgaaacacctggaacttccgaaagcgctacgcctgaatcttctggtggatcttctggcggatcttccgcatgcgtcgacagcaacagtcaaccaaaactgagaccacagcaaacctcacaggaagcctgcgatgccgagaatatggttaagcctgaggggatgcatcgggaaagaagtgccggtgctgtacgtaactctggggagacctctgagacagaaagcttaatggaacaggtcgtggcgagggctaatatgctggccgctctccgaagagtggagtccaataagggtgcccctggaaacgacggtatgaccgtcgctgaactgaggggctacctgaaaacaaactggcctagaataaaggcagaactgttggctgatgcttataaacctcaagccgtgcgcagagtggaaatgcccaagccagacgggggcataaggctcctcggcattcctaatgtcgtggaccgtttggttcaacaggcacttctgcaggtgtttacacctatcttcgacccaacgttctctgctttctctttcgggttccgtccaggcagaagcgcacatgacgccgtcaagcttgctcgggattacatcgaggctggggacgagtgggttgttgacatcgacctcgctaagttcttcgaccaggtgaatcacgatcggctcatggcacgcatttggaggagagtgaaggataaaagggtgcttcatctgataagaaggtatctgcaagccggcgtgatgcttaacggagtggttatcgctactgaagaaggaacaccccagggagggcctctgagcccactgttggccaatattatgctcgatgacctggacaagctgctggaacagcgcggacaccgattttgtcgctacgccgatgactgtaacatttatgttcggagtcagcgagccggagagagggttatgagttccgtgcgccgattcattgaaggccgcctgggactcaagataaacgaaagtaagtccaaagtagacaggccccggaataggaagtttttggggttttccttctttcggagacatggaataaggatgagggtcgcttccaagtcactcgagaggttcaaaactcgagtgcgagaaataacagcacggagcaacggctggagtatggaaagacgtatttacgctctccgcatatacctcaggggctggatgcaatactttcgtctggcggaaactcctaaggtttacagggaactggactcatgggtcctccaccgactgcggttatgccagtggaaacagtggaaacggccacggacacgattgcgaaagctcagagctctgaaactgaacgaggatgatgcatgtaaactggccggatcacgtcgagggtactggcccaccacatgcggtgctcttcataaagcaatgccgcgcaggtactggatcgaacggggcttcgccgggctttccgaatgctttgtcttatccgtagatatctga

SEQ ID NO: 1757 - DNA, 1863 bp, synthetic construct
  source 1..1863: mol_type = other DNA; note = FH-MCP-MG153-115
atggactacaaagacgatgacgacaagtacccctatgatgtacctgattatgctgccagcaatttcacacagttcgtccttgtagacaacggcggcaccggggatgttacagtggccccgagcaatttcgcaaacggcgtagccgagtggatctcctctaatagcagaagccaggcttataaggttacatgctctgtaaggcagtcttccgcacaaaatagaaagtacacaatcaaggtcgaagtgcccaaggttgctacacagaccgttggtggagaggagttgccagtggctgggtggcgctcctacctgaatatggagttaacaatccccattttcgctaccaattcagactgtgaactcattgtcaaagctatgcaaggtcttcttaaggatggtaacccaattccaagtgcaattgctgctaattcaggcatttattctggcggcagcagcggcggctcaagcggaagtgaaacacctggaacttccgaaagcgctacgcctgaatcttctggtggatcttctggcggatcttccgcatgcgtcgacggcgggaaaaggcagaagaatcagctccagatggtcctggcgtttgccgtggagggtagatctgaagcccctatggcccgtcgcgaggggattgaaactagtaccgctaagagagagtgcgagagcccagctattcctggccaagtaatggaggaagtctgcgagagggaaaactgtctgagggctctgaaacgggtgaagtccaataaaggcagccccggcatcgacgggatgaaggtagaagaattgcctggctaccttaaacaacattggctcgcaataagagagcagttgctctctggcaattatgagcctcagcccgtgagacgtgtcgaaatccccaagcctgacgggggcgtccgcaaactgggaatacctaccgtgttagacaggtttgtgcagcaggcagtgatgcaggtcttacagggacggtgggatgggacattctccgagcactctcacggatttcgtcctggcagatccgctcaccaagccgtgagaaaggcacagcaatacgtggctggaggcaggagatgggttgtggacctcgacttagagaaattcttcgaccgcgtgaaccacgatcgcctgatgaaatccgtcgctttacggatcgctgacaagcggatgcttaggcttataggcgcattcctgaaagctggggtgatggagaatggcctggtgagcccagtcgatgagggtactccgcaggggggccccctgtcaccactccttagcaaccttgtcttggacgaactcgatagggaattagaaaggcgcggacattgttttgtgagatacgcagacgattgtaacatctatgtaagaagtggcggcgccggcaggcgggtgatgaggagtgtgacttgcttcatcacccgccgcctcaagttaaaggttaatgaatctaagtctgctgttgctcggcctgtggaaagaaaatttttaggctttagcattagtaacgcaagggaaccaaagcgcagaattgctccaaaagtgctgctgcgatgtaagagaaaaattagagagttgacgaggaggacaaggggcatctctcttgaaagaatgaccaaggagctcacgtcctatctgagaggttggaaatcatatttcggcatctgtgaaacaccaagcgtactgaagtctctggatcaatggatcaggcggcgcttacgatccgtgatccagaaacagtggaaacgacaatgcccctggagaatggctaattcccccgcaatgagccttgcattccccatcgcctacttcgacagtttgggcttgccacggctgtttgcaggagatatctga

SEQ ID NO: 1758 - DNA, 1947 bp, synthetic construct
  source 1..1947: mol_type = other DNA; note = FH-MCP-MG153-116
atggactacaaagacgatgacgacaagtacccctatgatgtacctgattatgctgccagcaatttcacacagttcgtccttgtagacaacggcggcaccggggatgttacagtggccccgagcaatttcgcaaacggcgtagccgagtggatctcctctaatagcagaagccaggcttataaggttacatgctctgtaaggcagtcttccgcacaaaatagaaagtacacaatcaaggtcgaagtgcccaaggttgctacacagaccgttggtggagaggagttgccagtggctgggtggcgctcctacctgaatatggagttaacaatccccattttcgctaccaattcagactgtgaactcattgtcaaagctatgcaaggtcttcttaaggatggtaacccaattccaagtgcaattgctgctaattcaggcatttattctggcggcagcagcggcggctcaagcggaagtgaaacacctggaacttccgaaagcgctacgcctgaatcttctggtggatcttctggcggatcttccgcatgcgtcgacaatctgcggaacgataaaagacaaaacatccagatggagctggacttcagttccggacccgtaggcgaggtgcgaagggccggccgtaaagaaactgagagtagtaggacagttaatgtctctgagagccccgcttcaacaaaccggctcatggaggaggtttgtgagagagaaaatcttatcgaggccttgaggcaggtcaaggcgaacaaggggtctgccggggtggatggcatgaccgtgggccagctgacggactacctgaaacagcattggccggctatccaagaacagctgctgagtggaacatacgaaccaatgcccgttcggagggtggaaataccaaagccagacggaggaggagtgagaaaactcggcattcctagtgtattggatcgcttcatacagcaggccgtcatgcaggttttacaacgaagatgggatcgtacatttagcgatcacagctatggattccgccctgggaggagcgctcaccaagcagtcgcccaggctcaacagtacatcgctgcagggtacacatgggtagtggactttgatctggagaaatttttcgatagggtgaaccacgacaagcttatgggccagatagccaagcgggttgaggataaaaggctcctgaagctgattagggcattcctcaacgccggggtgatggaaaatggcctcgtttccccttctgtagagggtaccccccaaggtggcccactttccccattattatctaatctcgtgcttgatgagctggacagggagcttgaacgccgaggacattgcttcgtaagatatgccgatgacagtaacatctatgtgcgctctgagcgggccggccaaagggtgatgaaatcagtcactaggtttatcacaaatcgtcttaaactgaaagtccatgaggccaaatccgctgtggcacagcctcaagaacggaagttcctgggatttaccttcacaactggtcccgaggttaagcgggctatcgctcctaaggctttagacagatttaagcgcagaatccgggagatcactaggcgcgccaaaagcgtaagcatagagagcactatcgcagagcgcgctccttacatgagaggatggaggtcttatttcggcttctgtgaaacacctgtggtgctcgagtacttaaccagatgggtccgcctgcggcttcgagccgcactgtggagacagtggaaaacaacaagaaggcgaagagctgcattgttggagctgggagttcggcccagattagcaagcaataccgctgttagcggcaggggcccatggtatctcgcacgcgccaaagcactgagtgtgggactgtccaatgcttatttcaagagcaggggattaccatccttgattgaggaaggggatatctga

SEQ ID NO: 1759 - DNA, 1890 bp, synthetic construct
  source 1..1890: mol_type = other DNA; note = FH-MCP-MG153-117
atggactacaaagacgatgacgacaagtacccctatgatgtacctgattatgctgccagcaatttcacacagttcgtccttgtagacaacggcggcaccggggatgttacagtggccccgagcaatttcgcaaacggcgtagccgagtggatctcctctaatagcagaagccaggcttataaggttacatgctctgtaaggcagtcttccgcacaaaatagaaagtacacaatcaaggtcgaagtgcccaaggttgctacacagaccgttggtggagaggagttgccagtggctgggtggcgctcctacctgaatatggagttaacaatccccattttcgctaccaattcagactgtgaactcattgtcaaagctatgcaaggtcttcttaaggatggtaacccaattccaagtgcaattgctgctaattcaggcatttattctggcggcagcagcggcggctcaagcggaagtgaaacacctggaacttccgaaagcgctacgcctgaatcttctggtggatcttctggcggatcttccgcatgcgtcgactcaaacctgtctgcaagaatgcctaccggcaatgacgttacccaacggattgatccgaagcccgccttctctaaggacctgtttgagcaaatgctgcttcccgctaacctgcagagagcttggcggcaggttagagctaataaaggcgctgccggagtggatggaatgggagtcgatgacttccctgcatgggtccgctctggagagtgggataaagttaaagccgccctcagagcaggcgattacttcccccagcccgtgcgtcgtgtggaaatcgaaaaacctgaaggcggaaagcggcctctgggcatccccactgttaacgatcgggtcatccaacaggccatcgcacaagtgctgacccccctttttgatcccgtcttctccgcacatagtttcggcttcaggcccgataggaacggccagcaggccgtgaagcaagttcaacagatcattaagcaacaacgccgcatcgcggtggacgtagatctgtctaaattcttcgaccgagtgaaccacgatgtgctgatgtcttttgtgagcaggtgggtgcatgataaaaggttaaagcagttaattgcccggtacctgcgggccggatacgtggacaaccagatattccatgaaactcgggaaggtgtgccacagggaggcccattaagtccactccttgcaaatataatgctggacccattggataaggaactcgaaaggagaggccataagtttgccaggtacgctgatgacttcattatcttggttagatctcagagagctggtgagcgcgtgttatgctcaatcacgcaatacctgcagaaccgtctcaagcttgttatcaacacggagaaatctcaagtcgtcaagaccaccgaaagtaaattcttgggttttactttcaagaactgcctcatacagtggcacccaaagacacttcacaaattcaagcagcgcattcgagagctcaccaatcgtaactggggagtctccatgcattaccagctgtttaaaacttcccaatttatccgaggctggatcaattatttcggaattgcaaactgttatcaactgtgctgtgacctcgatcactggattcgtcgtagggtaaggatggcctactggcgccagtggcgcaaacctcggacaaaggttaggaatctgatgagactgggagttcacgtccaggccgctgtggcttgcggtatcacctctaaaggcccctggaggtccagcaaaacaccaggaattaatcaggccctctctaatgaatttctgaagaagtccgggcttgtgactttgagagatggatggattaagctgcattatcctgaagatatctga

SEQ ID NO: 1760 - DNA, 1788 bp, synthetic construct
  source 1..1788: mol_type = other DNA; note = FH-MCP-MG153-118
atggactacaaagacgatgacgacaagtacccctatgatgtacctgattatgctgccagcaatttcacacagttcgtccttgtagacaacggcggcaccggggatgttacagtggccccgagcaatttcgcaaacggcgtagccgagtggatctcctctaatagcagaagccaggcttataaggttacatgctctgtaaggcagtcttccgcacaaaatagaaagtacacaatcaaggtcgaagtgcccaaggttgctacacagaccgttggtggagaggagttgccagtggctgggtggcgctcctacctgaatatggagttaacaatccccattttcgctaccaattcagactgtgaactcattgtcaaagctatgcaaggtcttcttaaggatggtaacccaattccaagtgcaattgctgctaattcaggcatttattctggcggcagcagcggcggctcaagcggaagtgaaacacctggaacttccgaaagcgctacgcctgaatcttctggtggatcttctggcggatcttccgcatgcgtcgacaaagaaaggatgcagaagacactctcacaggttaatggctgccctcagcgtgataggagcgaaactgagtggtacggtggcgttcagactttcatgtggatgtgtgaagataacatagtggaggtgccgtttgacaaggagcacttatttgaacagattctttctccctccaatctgaatcgagcctataaggctgtcatgagaaacaaaggttgtggcggcattgacaagatgtcctgcgagcagttgctgccctggctcttgaccaataaagatgcattgatacggagcctgaaggatgggagttatcggccaaaccctgtgaagagagtggagatgcccaaagacaacggtaaaatgcgtctgcttgggattccaacagtagttgatcgcctggtccagcaagccatcaatcaagtgcttactcccatttacgagaaccaatttagcaatacttcttacggtttccggcccagacggggatgtcatgacgcactgcgtggcgctcaacggattattaacgagggatatatttacgtcgtggatctcgacctggagaggttcttcgacaccgtctcacattccaagttaatcgagatactgtccaggactattaaagatgggagggttgttagtttaatccacaaatccctcaggagcggagtgatgaacaagggccttttcgaagcgagcgaagaagggaccccgcaggggggcccactctcccctcttctttcaaacatcatgctgaatgaactcgacaaggaactggagcggcgtgaactgccctttatccgatacgcggatgattccatgatattttgcaagagcaaacgcgcagctatgagggtaaaagaatctatcacacgttttattgaaaacaccttgaatctgaaggttaataaggaaaagactattgtgagctatgtacttggcgtaaaatatttggcctattaccacctggccaatatgaagaggcttctgcatgtgaccgatgagtggctgcggaggaggattcgtatgtgtatttggaaggcgtggaagaagcctaaaactaaggtggcaaagctgatcaagtgtggaataaacaagagtcaagcttatgaatgggggaacacacgaaagggctattggcgcatcgcgaactcctacatcctgcacagagcaatcacgaacgaacatctgtgcagagcagggtacgtcaccttaatggacgcctaccttgaagatatctga

SEQ ID NO: 1761 - DNA, 1968 bp, synthetic construct
  source 1..1968: mol_type = other DNA; note = FH-MCP-MG153-119
atggactacaaagacgatgacgacaagtacccctatgatgtacctgattatgctgccagcaatttcacacagttcgtccttgtagacaacggcggcaccggggatgttacagtggccccgagcaatttcgcaaacggcgtagccgagtggatctcctctaatagcagaagccaggcttataaggttacatgctctgtaaggcagtcttccgcacaaaatagaaagtacacaatcaaggtcgaagtgcccaaggttgctacacagaccgttggtggagaggagttgccagtggctgggtggcgctcctacctgaatatggagttaacaatccccattttcgctaccaattcagactgtgaactcattgtcaaagctatgcaaggtcttcttaaggatggtaacccaattccaagtgcaattgctgctaattcaggcatttattctggcggcagcagcggcggctcaagcggaagtgaaacacctggaacttccgaaagcgctacgcctgaatcttctggtggatcttctggcggatcttccgcatgcgtcgacaacgtcactgaaagcggtttcaagaataggcagctccatatggaggactatctgcagatggtatcagcagagcagagggaatatgctgaggttttcgattactccaagatcaccgagaagtctggcgtgataactgactattggactaataatttactggatctgatcctgagaaaggggaacctcaacgaagcatacaagcaagtgaagaggaataaagggaaaggtggcatcgacggaatgcaggtggacgagctgctcccctttcttagagagaaccaagagaccctcattcaagaaatcagggagggaagatataaacctaatcccgtacgaagggtggagattcccaaagaaacaaagggagaatttagaaaattgggcgtcccaaccgtcgtggacagggtcatccagcaggcaatcgcccaggaactctcaccaattttcgaagaacagttttccgagaactcctttggtttcagaccgaagcgtggtgctcatgacgctctgaagcaatgtcagaaaaatgtaaatgatggttacgtttacgtggtcgatatggaccttgagaaatttttcgacaccgtatgtcaatcaaaattaattgaagtcctcagtaggacgattaaagacggccgagtgatttccctcatacataaatatctgaatgcgggggtggtcgctaacggaaagttcgaacggactgaggttggtatgccccagggcgggccactgtcccctctgctgtcaaatatcatgttgaacgaactggataaagagctcgaacggcgtggccaccggtttgtacgctatgctgatgattgtatgattttctgtaagtccagaaagtcagccgagcggactttggagaatatcattcctttcattgagggaaagttattcctgaaagttaataggaaaaaaactgaggtctcccacataagcaaagttaaatacttaggatacactttctataggtacaaggggaaatgtcgcttcagggtccatcccaagtctgtgtcaaaaatgaagaataagattagagagctgaccgacagaaataaaggaatttcaaatgctgaacgagagaagaagtaccaggagtacgttcgagggtgggtcgagtactttcggctcgcagacatgaagggtttgcttaaagagacggatgaatgggctaggcgtcgcatccgcgcagtctactggaagcaatggaagaagattaagacaaaatatcgaatgcttaaggcacttggcctcgaacactggaaggcaaaagaactggcctgcagcagaaaggggtattggcgcatggcgaaagtccttaaccagatctttagcaataaaattattgcccgcttaggatacacgtcaatgcttgattattatctggtggtgtacgaaaatgatatctga

SEQ ID NO: 1762 - DNA, 1893 bp, synthetic construct
  source 1..1893: mol_type = other DNA; note = FH-MCP-MG153-121
atggactacaaagacgatgacgacaagtacccctatgatgtacctgattatgctgccagcaatttcacacagttcgtccttgtagacaacggcggcaccggggatgttacagtggccccgagcaatttcgcaaacggcgtagccgagtggatctcctctaatagcagaagccaggcttataaggttacatgctctgtaaggcagtcttccgcacaaaatagaaagtacacaatcaaggtcgaagtgcccaaggttgctacacagaccgttggtggagaggagttgccagtggctgggtggcgctcctacctgaatatggagttaacaatccccattttcgctaccaattcagactgtgaactcattgtcaaagctatgcaaggtcttcttaaggatggtaacccaattccaagtgcaattgctgctaattcaggcatttattctggcggcagcagcggcggctcaagcggaagtgaaacacctggaacttccgaaagcgctacgcctgaatcttctggtggatcttctggcggatcttccgcatgcgtcgacagtgtaagccaaagagtcacacagaatcagtactttatctaccttcggaagagaaaagaggaaacagacatggaattactggaggaaattcttaatcagaataacttgaataaggcctacaagaaagtggtagcgaataagggcgtagccggcgtggatggaatcacagttgaagaagaatttgattatctcaaggagaataaagatagaatcataaaccaaatcagaaaacgtaaatacaagcctcagccagtgaagcgggtccagatacccaaggagaatggaaagatgaggaatctcggcattcctacggtgacggaccgcattattcagcaggccattttccaggtaatatcccccattttcgagaagcagtttaacgataactcatttgggtttcgtccaaacaggtcttgcgaacaggccgtgatccgcgccttagagtacctgaacgacggttatgaatggatcgtggacatcgacctcgagaagttctttgacactgtgaaccaggacaaactgatcacaatcatcggaaagactataactgacggggatgtcgtttcattgatcaggaagtaccttagtgccggcgtcatggaaaagggaatagttaaggccactactgttggaacaccccagggcgggaatctctcccctcttctgagcaacatcatgctgaatgagctcgacaaggaattggaagccagaggtctgaatttcgtaagatacgcagatgactgcatcatcctggtcaagagtgaaaaggcggctaatcgagtcctggcctccatcacgaaatttattgaaaaaaagctgggattaaaggtgaacgctgagaagtcaaaggtgaccaggcctgcccaaacaaaatacctgggtttttccttttggaagtctccgaaagggcagtggaagcctaaacctcacctgaaatcctaccagaaactggtgcgcaaacttaagcagttgactgatcgctcttggtcaatctccctggacaacagaattaaaaagatcaactacgtggcacgaggatgggtgaattactttagaatcgcaaacatgaaaaacaagattactgaaatcgacgagcatttgagggtccgtattcgggtgattatctggaaacaatggaagaagatcaggaagaaatgtgagtcactgcaaaaactcggagttcccttcgaaattgcctttaattgtgccaatacccgtaagggctactaccaaatttgcaaaacacgttacattcagttcgccatcaataatgaacgcttaaggaagagagggttggtctttctgctggatcaatatgagaaggtacacatagatatctga

SEQ ID NO: 1763 - DNA, 1848 bp, synthetic construct
  source 1..1848: mol_type = other DNA; note = FH-MCP-MG153-122
atggactacaaagacgatgacgacaagtacccctatgatgtacctgattatgctgccagcaatttcacacagttcgtccttgtagacaacggcggcaccggggatgttacagtggccccgagcaatttcgcaaacggcgtagccgagtggatctcctctaatagcagaagccaggcttataaggttacatgctctgtaaggcagtcttccgcacaaaatagaaagtacacaatcaaggtcgaagtgcccaaggttgctacacagaccgttggtggagaggagttgccagtggctgggtggcgctcctacctgaatatggagttaacaatccccattttcgctaccaattcagactgtgaactcattgtcaaagctatgcaaggtcttcttaaggatggtaacccaattccaagtgcaattgctgctaattcaggcatttattctggcggcagcagcggcggctcaagcggaagtgaaacacctggaacttccgaaagcgctacgcctgaatcttctggtggatcttctggcggatcttccgcatgcgtcgacgaacttatcgagaaaattttatccgaagactcaatcaatgaagcgatcgaaaaggtggtgagtaacaagggtgcggcaggagtagattctatgaccacagctgaagtagaatcctactatttcacccatggctttgaaataatcacgcaaatcaaaaacaagatctacaaacctttgcctgtaaggagggtctacatccctaaaccaaacggtaagaagcgccccctgggcatccctgtagtgaaagatcgggttattcagcagagtctggcacaggcgctgagtgacatctatgagccccactttagtgattacagctacggttttcgtaagggacgctctcagcacgacgccatgaacaaagtgctggaatacctcaacgacggatacgagtgggtcatcgatctcgacatcgaaaaatatttcgatacagtcaaccacgacaaactggtctccattttaagggagcgggtgaaggatgacattaccctgcacctgatcaggagtatattaaagtccggaataatggaagatggcttagtttcaccctctgaggagggcgtacctcaaggctctccggtgtcttgtgtcctttccaatatctaccttgataaattcgataaagagctggaagcgcgggggcttaggttcgctcgatttgccgacgacgtgaatatctttgttaagtcagagatgtctgcagagagggttatgaagtctataagctcatggctggaaaggaaattgttcctgaaggtaagcgccaccaaaaccaaggtggtgagacctaaagacagtaattttctgggattcacctttgtgaaaagtaaggacgggtggaagtgcaagccaatggatgatcggaagaaaagattatacagtaagtgcagggcggtactcatcaggcgaaaagccgtcgccgttccattgtccgtgacctttaaacgagtcaacgaaatcgtgcggggttggatcaactactttcggataagttcaatgaaaatgtttatgaaagagtttggccagtggctccggcataagatccgcgccattatacttaagcagtggaagaaaccgttgaggatatacaagaacctcatgtatatgaacaagaagcagcgttgtggtttttcccatgaggacattttcaaagtggccaatagtcgcaagggtctgtatgcccgcgccaacggtgatgtggtgaactttattctctctcctaagatcctggctatcaagtccggtgataggccgggcctggtgaaccccctcgagtattatctgggtgatatctga

SEQ ID NO: 1764 - DNA, 1851 bp, synthetic construct
  source 1..1851: mol_type = other DNA; note = FH-MCP-MG153-123
atggactacaaagacgatgacgacaagtacccctatgatgtacctgattatgctgccagcaatttcacacagttcgtccttgtagacaacggcggcaccggggatgttacagtggccccgagcaatttcgcaaacggcgtagccgagtggatctcctctaatagcagaagccaggcttataaggttacatgctctgtaaggcagtcttccgcacaaaatagaaagtacacaatcaaggtcgaagtgcccaaggttgctacacagaccgttggtggagaggagttgccagtggctgggtggcgctcctacctgaatatggagttaacaatccccattttcgctaccaattcagactgtgaactcattgtcaaagctatgcaaggtcttcttaaggatggtaacccaattccaagtgcaattgctgctaattcaggcatttattctggcggcagcagcggcggctcaagcggaagtgaaacacctggaacttccgaaagcgctacgcctgaatcttctggtggatcttctggcggatcttccgcatgcgtcgaccggctcattgacgaaatcctgagtgatagcaatattgatcgggcgatccttcaagtgaagaggaataagggggttagcggcatcgacaagatgacagtagacgaattagatgagtatttttacaagcatagacgcgagatcagatattccatccttaataagaagtacaagccgcaatccgttaagagagtgtatatcccaaagcctaatggaaaaaaacggccgttgggtataccaactgtggtggatagagtgatccagcaggctgtggctcagattcttatgaagaaattagactccagtttctgcgaattttcctatgggtttcggccccggcggagcgcccaaatggcagtgttaaagacactggaatatatcaacgaaggatacgattgggtgatagatcttgatattgaagcttatttcgacactgtgaatcacgataaactgatctcaatcttacgagaaaagaacgtgaacgattccactacactgcatcttatcagaaagtttatgcaagcaggcatcatggaggacggcttagtcaagccctccagggtgggtgtgcagcagggcggtccactgagtcccattctcagcaacttgtacctgaacaaattcgacaaggaactggaaaatagagggctgcgatttgtacgatatgccgacgattgcaatatattcgtgaaatctgagatgagcgccaatagggtcatgaagtctgtcacatcatggttggagcggaaactgttcctgaaagtgagcgcgacgaagaccaaggttgtacgcccccctgaatctaaattcctgggattcacatatcttaaacgctatggagaatggaagtgtaaacctagcaaccagtcaaaaatgaaaatctatgataaatgtagaagagagcttatccggagaattggaatcgcgagaccactggctgtcacttttaagcgcatcaatcagattgtggtggggtggattaattactacaggatcggggttatgaaatacttcattgatgttttcggtcagtggctgaggcataaaataagagttatcatattgaagcagtggaagaggcctaaaacaatctacaagaatctttacaagatgaacaggcttttcagctgccagttcagcgatgaacaaatcttcagtgtggccaactccaggcggagactttattctcaggcctgtggacatgtaatcaacaatattattagtccaaaatttttggggaaacgcatcggcgacagacccggactcgtgaacccactgaactattaccttagcgatatctga

SEQ ID NO: 1765 - DNA, 1887 bp, synthetic construct
  source 1..1887: mol_type = other DNA; note = FH-MCP-MG153-124
atggactacaaagacgatgacgacaagtacccctatgatgtacctgattatgctgccagcaatttcacacagttcgtccttgtagacaacggcggcaccggggatgttacagtggccccgagcaatttcgcaaacggcgtagccgagtggatctcctctaatagcagaagccaggcttataaggttacatgctctgtaaggcagtcttccgcacaaaatagaaagtacacaatcaaggtcgaagtgcccaaggttgctacacagaccgttggtggagaggagttgccagtggctgggtggcgctcctacctgaatatggagttaacaatccccattttcgctaccaattcagactgtgaactcattgtcaaagctatgcaaggtcttcttaaggatggtaacccaattccaagtgcaattgctgctaattcaggcatttattctggcggcagcagcggcggctcaagcggaagtgaaacacctggaacttccgaaagcgctacgcctgaatcttctggtggatcttctggcggatcttccgcatgcgtcgacgaacaggataacccagacagcgctgccaaggcgactcagggcggcgatgcagccggaggacagcccagaacctggtggtgggctgaagccagcatctggacagaccgtatgatgtccgccttggggaatggagttaaggggggtaagtggttttctttagttgacaaagcaatccgtccaacgactctggaggcagcatggagaaaagtcgagagaaacaagggggcggcaggggtggatggccagagcatagaacggttcgcggccggtgccgagaggtatcttgcggaactgcatgaaaatctgaagaacggtagttatagaccatcacccattaagcgggttgatattcccaagggtggtggccagacgaggcctctcggcatacctaccatcaaggatcgcatagttcaaaccgcccttaagatgaccattgagcctatatttgaagtccaattccgaccaggcagttatggctttagacccggtcgtagttgtaaggacgctctccgggaagtggataggcttctcaaagaaggctacacacatgtcgttgacgccgacctgaaatcctactttgatactattccacacgatcgccttatggcacgagtgggagagactatctcagacggccgcgtccttaagctcatcgatgggttcctgaagcaggaaattatgtcagatatggctcggtggctcccaacaacaggaacaccgcagggggcagttttgtctccgatgttagctaatatctatctgcaccctctggacctgctgatggagcagagcgggagacggatggtgaggtatgctgatgactttgttatactgtgcagaactgaagacgaggcgcgagcagcattacgggatgtggatgcttggactacagctaacggactgacattacaccccgacaagactagaatagtcgatagcaggcagcctggtcagggttttgacttcctgggctacaggttcgaggcagggagaagattcgtccgggacaaaagcctgcgggcgtttaaggataaggtgcgggccaagactgtgcgcagtcggggcgacagtctggctcgtataatagcagacctcaacccagctctgcgcggatggttcggatattttaagcacgcagctccattccaactcaggtacctggatcgatttgttcgtagaaggctgcgcgccgtgctcaggaaacaggacaagagacctggcttcgggaggtgcaaggccgatcatcagcgttggcccaacgcgttctttgccgaccagggactttttacattaactaccgccttggcacacgcgagacactcccgggatatctga

SEQ ID NO: 1766 - DNA, 1872 bp, synthetic construct
  source 1..1872: mol_type = other DNA; note = FH-MCP-MG153-125
atggactacaaagacgatgacgacaagtacccctatgatgtacctgattatgctgccagcaatttcacacagttcgtccttgtagacaacggcggcaccggggatgttacagtggccccgagcaatttcgcaaacggcgtagccgagtggatctcctctaatagcagaagccaggcttataaggttacatgctctgtaaggcagtcttccgcacaaaatagaaagtacacaatcaaggtcgaagtgcccaaggttgctacacagaccgttggtggagaggagttgccagtggctgggtggcgctcctacctgaatatggagttaacaatccccattttcgctaccaattcagactgtgaactcattgtcaaagctatgcaaggtcttcttaaggatggtaacccaattccaagtgcaattgctgctaattcaggcatttattctggcggcagcagcggcggctcaagcggaagtgaaacacctggaacttccgaaagcgctacgcctgaatcttctggtggatcttctggcggatcttccgcatgcgtcgacatcgagcaagttctgaatcagcggaatattatgcaggcttatcgccaggttgtttccaataagggaagcgcgggtgttgatggcatgagcgtgaaggagctctatgttcacctgacaaacaaccgggaacagatcgagagcgacataagagccggaaagtaccttccacaggccattaagggcgtggagatccccaaaggtaatggcaaggtgaggctgctgggggttccaaccgttacagatcgattattgcagcaagccgtcggccaggtgctggcaatcaaattcgagatggtgtttgaggacaactcttatgggttccggcctaatcgcaatgcccagcaggccgtgcttaaagcgcaggaatacataaactccgggtatcatcatattgtggacattgaccttaaaagtttctttgatgaagtagaccacggaattttactgcagttattgtatagaaaagttaagtgccctctcacgcttagactgattcggaagtggctccgggccccgattctgattaacgggaagctgatcaagcgaagaaagggggtgccccaagggtctcctttatctcctctgctccctaacatcatgctcaatgagcttgacaaagagcttgaaaaacaggggttgagatatgttcgatatgccgacgactttagcatctatacaaaaagcaacacagccgccagaaaaattggcaactccatctttttatttttaaaggataagctgaaattgcccatcaaccgggaaaaatccggcattaggaagcccgtcaactttaaggtacttggttacggtttcgttccgacgtatcgcaagggtgagaagggtaaataccagctggtcgcgaatgagaagagctggaagagcctcaaggagaaactgaaaaccattacacggaaaacaactcctatgtctttcgatgagagaatccaaaagctgaaagaggtgacccagggttggttaaattattttaggatggccagcattcatggaaagctgaaagagctggacggttggcctcgcaatcggttgaggtactgcatttggcaccattggaaaaagccggaacggaaacggaagaatcttattcaattgggagtagatcccgagcacgcttatcagtggtcacgcacacggatgggtggctgggctactgcccagtccccaattttggttacaacaatcaccttagaaaggcttagagagcgaggctatgaggccttactgacttattacgaaaagatcgcaccacatctgaatgaacccttgtatacacgtacggtacggactgtggtagatatctga

SEQ ID NO: 1767 - DNA, 1956 bp, synthetic construct
  source 1..1956: mol_type = other DNA; note = FH-MCP-MG153-126
atggactacaaagacgatgacgacaagtacccctatgatgtacctgattatgctgccagcaatttcacacagttcgtccttgtagacaacggcggcaccggggatgttacagtggccccgagcaatttcgcaaacggcgtagccgagtggatctcctctaatagcagaagccaggcttataaggttacatgctctgtaaggcagtcttccgcacaaaatagaaagtacacaatcaaggtcgaagtgcccaaggttgctacacagaccgttggtggagaggagttgccagtggctgggtggcgctcctacctgaatatggagttaacaatccccattttcgctaccaattcagactgtgaactcattgtcaaagctatgcaaggtcttcttaaggatggtaacccaattccaagtgcaattgctgctaattcaggcatttattctggcggcagcagcggcggctcaagcggaagtgaaacacctggaacttccgaaagcgctacgcctgaatcttctggtggatcttctggcggatcttccgcatgcgtcgacacaaccggagccgctgagggccgtgtcgaaatgcccggagccaaaccggaggttggaggacgcaagcctctggtgagcggagatggcgctgccaatgtgacaggcagaactgatcatagcggacctgagactgaaagactgatggaaacagtgctgtcccgcgggaatatgatgactgcactgtctcgggtggttgcgaataagggtgcccccggtgtggacaatatgccggttaccgacctcaaaggatatttacacgagcactggcctagaataaaagaagaattgctgggcggtaagtacagacctcaaccggtcctgaaggtcgaaattcccaagccaggcgggggcaagagaatgctcggaatccccaccgtccttgaccggcttatccagcaggcggtgcaccaggtactttctctcaaattcgactccgacttttcagctaatagttatggattcagacctggacggaatgcacaccaggcggtccaagcagctcggcagtatgtagccgaggggcggagatgggtggtagacatggacctcgagaagttcttcgaccgcgtgaatcacgaaatccttatgtcattggtcaaacggaaagtgaaggacaggatggtgttgaaattaatcgattcctacctgaaagccgggatgcttgatggcggtgtggtgtcccccaggcaagaggacaccccacagggaggccctctctccccactgctgtcaaacattctgctggatgagcttgacaaagaactggaacgtcgcggccatgcattttgtagatatgccgatgattgtaacatttatgtcgcaaccaaggcatctggagagcgcgttatggcctccatcactaggtttctttctcaacggctgaagcttactgtgaatcaggctaagagcgcggtagaccgaccctggaagaggacattcttaggatatactatgaattggtatcccaggcccagacttcgggtaggggctgtggctgttagccgattcagagcaaatgtccgaaaagtatgtaggcgcgggagagggcggtcacttccacaggtgatcaacgaattaaatcctaaagtcaggggctggctgaactactttagacacattgaaagcgactacctgcttaaggagttggatgggtggctgaggcgtaaactccgggttatcatctggaaacagtggaagcgcacaaggaccagggctaaaaacctgatcaagcctggtctgtcctccggagcatcttggagattcgcacgcaagcagagaggcccctgggtggcagctggagagaatgttatgaaccgtcttctgaacaatgcctatttcgagtctttgggcctcgtcagcctgcagaatcaatatcatcggttacagcgagtgtcagatatctga

SEQ ID NO: 1768 - DNA, 1890 bp, synthetic construct
  source 1..1890: mol_type = other DNA; note = FH-MCP-MG153-127
atggactacaaagacgatgacgacaagtacccctatgatgtacctgattatgctgccagcaatttcacacagttcgtccttgtagacaacggcggcaccggggatgttacagtggccccgagcaatttcgcaaacggcgtagccgagtggatctcctctaatagcagaagccaggcttataaggttacatgctctgtaaggcagtcttccgcacaaaatagaaagtacacaatcaaggtcgaagtgcccaaggttgctacacagaccgttggtggagaggagttgccagtggctgggtggcgctcctacctgaatatggagttaacaatccccattttcgctaccaattcagactgtgaactcattgtcaaagctatgcaaggtcttcttaaggatggtaacccaattccaagtgcaattgctgctaattcaggcatttattctggcggcagcagcggcggctcaagcggaagtgaaacacctggaacttccgaaagcgctacgcctgaatcttctggtggatcttctggcggatcttccgcatgcgtcgacgaggataagccttctaaagtgccagcaacagcgccccaggggggagacatcagggcccgctgggcttgggtagagcctgcagtttggacagatccaatgcttaccgctctcgagcagggagtgcgaggcggtaaatggtttagactgattgacaaagtattctccgagaagaatctgctggcaagccataggaaggttgaggctaacagaggcgcccccggcgttgatcatgttacgattgaggagttttcacaacagcttggccctaacctggagaatctgacagccgctctgagaggcggatcttacatgcctcaggccattagacgtgttttcataccaaagccaggcggaagggaacaacggcctctgggcatccccaccgtgagagacagggtcgtgcagggagcggtacgtcacgtgcttgaaccgattttcgagagggagtttgcagaacagtcctacggcttcaggcctgggcgcggctgtaaagacgccctgaggagagtggatcacctgttaaaaaatggttttgagcacgtggtggatgttgacctcaaaagctattttgacactattcctcatggaaggttaatgaatagagtgagagagagggtagctgacggcagggtgctcgaccttgtcgaagcattcctgaaggcaggaatcatgaacggtctggaggagacagagcctgaaatgggagctccccaaggcgctgttctctctccccttctctccaacatttacctgaatccattagatcatctgatggtgtccaaggattttgaaatggtgcgttatgctgacgactttgtgatcttgtgccgaagccgggaggaggccgagcaggcactggccattgttaggcagtggtgcgaagctgaaggattaacagtacaccccaccaagactaaagtagtccacgtgagaaatgaaggatttgactttttaggttaccactttcaggcaactcagagaggacggctgacccggtggcccagagagaaatctttgatgaagctgagggataccatccgttctaaaacacgcaggaccaacggcaatagtctcgagtgcgtgatcctcgacctgaatcgcagtctcagaggatggtttggctattttaaacacagctgcaggcaaagtctccggcagatcgatatgtggatcagagggaggctcagaactctcctgcgaaagcggtctaagcggtccggcttcgcttgtggggaggaccagaagcggtatcgtaatgctttttttgaagagcttggtctctttaacttgacagcggctcatggattagaagggcagtcttcccggggcgatatctga

SEQ ID NO: 1769 - DNA, 1887 bp, synthetic construct
  source 1..1887: mol_type = other DNA; note = FH-MCP-MG153-128
atggactacaaagacgatgacgacaagtacccctatgatgtacctgattatgctgccagcaatttcacacagttcgtccttgtagacaacggcggcaccggggatgttacagtggccccgagcaatttcgcaaacggcgtagccgagtggatctcctctaatagcagaagccaggcttataaggttacatgctctgtaaggcagtcttccgcacaaaatagaaagtacacaatcaaggtcgaagtgcccaaggttgctacacagaccgttggtggagaggagttgccagtggctgggtggcgctcctacctgaatatggagttaacaatccccattttcgctaccaattcagactgtgaactcattgtcaaagctatgcaaggtcttcttaaggatggtaacccaattccaagtgcaattgctgctaattcaggcatttattctggcggcagcagcggcggctcaagcggaagtgaaacacctggaacttccgaaagcgctacgcctgaatcttctggtggatcttctggcggatcttccgcatgcgtcgacgatgatattctggataaaatattgatgcctgagaatatccgagcagccatcgacgaagtgaggaaaaacaaaggcgcacccggcatagacaaaatgccagtcgatgaacttatgggcttcttcgctctgaatgaatccgccgtcatcaggcaaatactgaacaaagaatataaaccccagcctgttcgacgggtctatatccctaagccaaattccgataagctgcgccccctgggtattcctaccgttattgaccgcgtggtacagcaaatggtggcacgtgttttcaccagggaatacgatccccctttctcccctcacagttacggatttagacctaatcgcgactgccataaagcgatggcggaagcgctggagtacctgaatgaggggcggacttggattattgactttgatattgaaaagtatttcgatacagttaaccatgacaaattaatcagtattctgcgggaaaatgtcaacgacgccgtaatcctgcacttgatcagatccttcttaaaggctggagttatggatgacggcctcgttagccctacagaagagggtgtcccccagggcgggcccctctctcctgtgctgtctaatatttacctggacaaattggataaagaacttgaagcgcggggccttgcttttgtgcggtatgccgatgatttcgtgatttttgccaggagtcgaaaaagtgcagagcgcgtgatgaagtccgtaacctcctggattgaaaggaaattatttctgaaggtctcacctaccaaaacccatattgtgccaccttcaaagtccgaatttctgggattcggattttggaagaacggctctgaatggaaatgcaaacccttagcctccagaaagtcaaggctctgggataagcttagagcagtcacttgtcggcgtaaggcagccgccattccactgagtgtgactgtcaataaagttaatgaaataatgcgtggatggattaactactatcgcattgggaacatgaaagggttcatggacctgaccggacaatggattagacaccgcatcagagttataatggtgaaacagtggaaaaagccaaagaccatccagaagaacctgagatggtactgcgccgtgtttcaccttaattttagcgatgaggatctctacaaggtcgcaaattcaagaaagggtttgtatgcacagtgcaatggcgacgttattaattatatactctccccaaaagttttgtcaatgaagcttactatcggaaaaggtcgcaattcaagggccgtttaccccgggcttgtgaaccccctggcttactaccttgggactaccgatatctga

SEQ ID NO: 1770 - DNA, 1968 bp, synthetic construct
  source 1..1968: mol_type = other DNA; note = FH-MCP-MG153-129
atggactacaaagacgatgacgacaagtacccctatgatgtacctgattatgctgccagcaatttcacacagttcgtccttgtagacaacggcggcaccggggatgttacagtggccccgagcaatttcgcaaacggcgtagccgagtggatctcctctaatagcagaagccaggcttataaggttacatgctctgtaaggcagtcttccgcacaaaatagaaagtacacaatcaaggtcgaagtgcccaaggttgctacacagaccgttggtggagaggagttgccagtggctgggtggcgctcctacctgaatatggagttaacaatccccattttcgctaccaattcagactgtgaactcattgtcaaagctatgcaaggtcttcttaaggatggtaacccaattccaagtgcaattgctgctaattcaggcatttattctggcggcagcagcggcggctcaagcggaagtgaaacacctggaacttccgaaagcgctacgcctgaatcttctggtggatcttctggcggatcttccgcatgcgtcgacaaggaaagaatgcagaatgaaagtcgtaagttaggacaaagcgagtctcgcgtagagcccaaagccatgactggactccagacttcaatgggaattattgagaacgggctcacagagttcaccaggcctaaagacggcctgctggaatttatcttgagtcccgtgaacttaaacgctgcatataaaaaggtgaagggaaataaggggtctggaggaatcgatggaatgtcaacagaatacttactgccatacctcaaggagcacggctccgaattggtagcttctctgagagaaggtacctacaagccgaatcctgtgcgcagggttgagatccctaaggccaacgggaaaaaacgtggattaggtatacccacagtggttgaccgcgttgtccaacaagccgtttcccaagtgctggaggtattgtatgaaccacagtttagcgagacctcatacggcttccggccgcgtcgaggtacccacaaagccctcttaaaatgcggcgagtacattgagcaggggtatgtgtttaccgtggacatggaccttgaaaaattcttcgatactgtctcccattccaagttgattgaagtattgagtaggtccgtgaaggacgggagggtggtgtcccttattcaccgctatttgaacgccggtgtggtcaaccgcggcaaatacgagccttcaagccttggcgttcctcaaggagggcccttatcccccatgttaagcaatataatgctcaacgagcttgataaagagctcgagcatcggggccataagtttgtcaggtacgctgatgacttagtgatcttttgcaagagtagaaaagccgctcagagaacctacgagcacatagtgcccttcattgagggcaagctgtacctgaaagtaaaccgcgagaaaaccaaagtcgcctatatgcgggacattaagttccttagctatgcattcggaaggcgcaatggcaaatgtcagtatcgcttgcatcccgaatcaatctccaaaatgaaggataagatacgagagctgacttcccgctcaaacggatgggggtatgagtatcggaagcagagactcacatggtacattcgcgggtggagcaactacttctcactggcaggatataagaaccgactggaggaatgggactcctggctgcgtcaccgtattcgcatgtgtatatggaaacagtggaaacgcgtccgtacaaggtatcacaacttacagaaactggtcccggatgaaaacagagtgagaacggctgctttcagtcggaaaagctactggcgaatggcttctcaccctgttgtgcacgaggctatgtcagatgagcggttaaagaaagccggttaccccacctttgctgaatactatgtagatttcaataaggccaggggatactatgatatctga

SEQ ID NO: 1771 - DNA, 1830 bp, synthetic construct
  source 1..1830: mol_type = other DNA; note = FH-MCP-MG153-130
atggactacaaagacgatgacgacaagtacccctatgatgtacctgattatgctgccagcaatttcacacagttcgtccttgtagacaacggcggcaccggggatgttacagtggccccgagcaatttcgcaaacggcgtagccgagtggatctcctctaatagcagaagccaggcttataaggttacatgctctgtaaggcagtcttccgcacaaaatagaaagtacacaatcaaggtcgaagtgcccaaggttgctacacagaccgttggtggagaggagttgccagtggctgggtggcgctcctacctgaatatggagttaacaatccccattttcgctaccaattcagactgtgaactcattgtcaaagctatgcaaggtcttcttaaggatggtaacccaattccaagtgcaattgctgctaattcaggcatttattctggcggcagcagcggcggctcaagcggaagtgaaacacctggaacttccgaaagcgctacgcctgaatcttctggtggatcttctggcggatcttccgcatgcgtcgacagtgaaatgctcgaaaaaatcttgtctgatgaaaacatcaggttggccaaaaaaagagtctacgcaaacaagggcgcgggcggggtggatgaggtgaccgtccaagaattggacgattacatggcccagaattgggaagatattaagcagcagatcagggaaaggaggtaccgtccccagcctgtccttagagtcgagatacccaaacccaatggtggcgtgaggaagctcggcatacctaccgtcgtagatcgcaccattgagcaggccatcactcaggtgctgtctccaatttttgaacagctgttttccgaccattcctacggattcaggccaaacaggtcctgcgaacaggctataaggaagctgcttgagtatttcaacgaagattatacatggatcgtagacattgacctggaaaaattctttgacaacgttccccaggataagctgatgagctatgtgggcagagtgattcatgacggggacactgagtccttgataagaaaaaatctgaaggctggtgtcatggtacgcggaaaatatgaaagtactaaagtcggcaccccccaaggcggaaatctgagtccacttctgtcaaacataatgttaaacgaactggataaggaacttgaaaaacgcgagttgcgattcacaagatatgccgatgattgtgtaatcgtggttaagtctgaggcaagtgcaaagcgggtgatgtattctattacctcttggatcgagaggaagctcgggctcaaggtgaacgccactaagactcaaattacaagacccatgaagctgaaatatttgggtttcggattctggaagtcaaaggagggctggagaacccgcccccaccaggattccgtaagtaagttcaaaagaaccatcaaaaagctttgtaaaaggagctggagcgtaagtcttacatacagattgggcaagctgaatgccgtggtgagagggtggatcaactatttcgctcttggagatatgatctccgcaattacccggatcgataagcacctcatggtgcaaatgcgggtgatcatttggaaacagtggaaagtgccaaagaaacgagagtggggactcaagaaactgggcgtgaagccatggatcgcccatgagcagtcccatatcaaaggttatatgaaagctgttaggctgccacaaattaagaaagccataagcaaagagaaactgacgaagcgcggcctggtgagtcctttggaatactatctcagacagcatacgctgaagcttaacgatatctga

SEQ ID NO: 1772 - DNA, 1854 bp, synthetic construct
  source 1..1854: mol_type = other DNA; note = FH-MCP-MG153-131
atggactacaaagacgatgacgacaagtacccctatgatgtacctgattatgctgccagcaatttcacacagttcgtccttgtagacaacggcggcaccggggatgttacagtggccccgagcaatttcgcaaacggcgtagccgagtggatctcctctaatagcagaagccaggcttataaggttacatgctctgtaaggcagtcttccgcacaaaatagaaagtacacaatcaaggtcgaagtgcccaaggttgctacacagaccgttggtggagaggagttgccagtggctgggtggcgctcctacctgaatatggagttaacaatccccattttcgctaccaattcagactgtgaactcattgtcaaagctatgcaaggtcttcttaaggatggtaacccaattccaagtgcaattgctgctaattcaggcatttattctggcggcagcagcggcggctcaagcggaagtgaaacacctggaacttccgaaagcgctacgcctgaatcttctggtggatcttctggcggatcttccgcatgcgtcgacagcctgattgaggaaattctgtcaaatgagaaccttaatgaggccatcaagagggtgaaagcaaacaagggcgcatcaggtactgacaagatgaccaccgatatgctggagccttacttctatgaacatcgaaaagaaattatcgagagcatcatgaataagacatataaaccccagcccgtcagacgagtgtatatacccaagtctaacgggaagcttcgtccgttgggcataccaactgtcgtcgatagagtgatccaacaggccatcgcccagaagctggtgccgatctatgaaaacgtgttctcagagtatagttacggctttaggcctaatcgcgactgccatatggccatcaacaaggttttggagtacctgaactctggctttgagtgggttatcgatctcgatattgagaagtactttgacacagtgaatcacgataagttgataagcatcctgagggaacaagtcaatgactcccacaccctccacctgatcagaaaattcctgcaggctggcgtgatggacaacggcctcgtatcttccactacaattggagtgccccagggcggtcccttgtcccctatcctgtccaacatttacctcgacaaatttgataaggagctcgaagctagggggttacattttgttcggtacgctgacgactgcaatatattcgtgaggtcagatgtgtctgcggagcgagtgatgaaatccgttacatcatggctcgaacgaaagctttttctcaaggtgtccgccactaaaactaagatcacgaggcccactaatagcaacttcttgggttttactttcttgaagaatagcgacaaatggaggtgtaaacccggcaaagacaggaaagccaaattgtacgagaaagtgaaggtggtgctcaagagaaagcacgctgtatctcgtccactggctaccacgttcaccaagttgaaccaaataattagggggtggatcaattatttccggattggcagtatgcgcaatttcatagatgagtttgggcagtggctcagacacaaagtgagaactataattattaagcagtggaaaaaacctaaaagaatttacgtgaacctgaaggtcattaatgatctttttaaatgtaatttcagccacgaagacatctttaaggtcgctaacaccaggctcggctggtacaaacgcgctggtatgaacgttgtaaattatattctcagcccaaaagttttagaactcgccaacaaaaagaagggcagaccaggcctcgtcaatccactggcctactacttaaaagatatctga

SEQ ID NO: 1773 - DNA, 1950 bp, synthetic construct
  source 1..1950: mol_type = other DNA; note = FH-MCP-MG153-132
atggactacaaagacgatgacgacaagtacccctatgatgtacctgattatgctgccagcaatttcacacagttcgtccttgtagacaacggcggcaccggggatgttacagtggccccgagcaatttcgcaaacggcgtagccgagtggatctcctctaatagcagaagccaggcttataaggttacatgctctgtaaggcagtcttccgcacaaaatagaaagtacacaatcaaggtcgaagtgcccaaggttgctacacagaccgttggtggagaggagttgccagtggctgggtggcgctcctacctgaatatggagttaacaatccccattttcgctaccaattcagactgtgaactcattgtcaaagctatgcaaggtcttcttaaggatggtaacccaattccaagtgcaattgctgctaattcaggcatttattctggcggcagcagcggcggctcaagcggaagtgaaacacctggaacttccgaaagcgctacgcctgaatcttctggtggatcttctggcggatcttccgcatgcgtcgacaagaaagcagaataccccggtaacgagggttgcccccagcgggatagcgccgaacacgaggaatatgcaggcgctcgtagcgccgatagaagagaaaccgaagaaacagatggagctgatctgctggagagaatcctggacagaggaaacctgaaccgcgcctacaaacgcgtgaaggccaacaaaggcgcacctggaatcgatggaatgacggtcgaagacgcgttgccgtggctccgggaacaccgcgaggagctgctcgatcagatccgcaatgggaaatacaagccacagcctgttaggcggaaggaaattccaaagccagatggtgggatccgcaagcttggtattccgactgtcgtggacagagttattcagcaggctattgcgcagcagttgacccccatttacgagccattgttttccgatggatcttacgggtatcgaccagggagatctgcacagatggcaattcagaaggtgaaagagtatgccgaacaagggtataccactgctgtccttattgacctgtcaaagtacttcgatactctcaatcatgacctcctgatgaacatggtgagggaagaggtacatgataaaagggttatcgaactgatcaagcgtttcttaaagtccggagttatggagaatggtctccacataaagaccgaggagggcagtccacagggcggacccctgagtccactccttgctaatatatacttgaataagtttgatcacgaaatggagtcacggggtgtacatgtgataaggtacgccgatgacattgtcgtgctggccaggactcccagagccggtgaaagacttctggagagcagtcgccggtatctcgagggcaaactcaaacttaaaatgaacatggataaatcccgcgtggtctcagtatatagcaaacgcaattttaaattccttggatttgctctcggtaaaggtaaagacggggtttttatccgggctcacgccaagtcacttaaaaaagccaagcaaaagctgaaggaattaacttctcgctcacagggacgtaacgtcagagtggtgatgtataaagttaaagttttcattcggggctggttagggtacttctacatcgccagcatgagaaacacaatgaaaagttgggatgaatggttacgacgaagattccggatgtatatctggaaacagtggaaaaaacccagaactcgcatgaggtatctcatgaagctgggagtgcctgattggcgggcctgtgcagtggcttactcaagaaaggcatactggcggtgcgccaaacatgccagtgttaatgaagccattagcagcaagcgtctggcacaggccggttattattcaatcctcgatcgatatgagtcattgcatctgtgtgatgatatctga

SEQ ID NO: 1774 - DNA, 1857 bp, synthetic construct
  source 1..1857: mol_type = other DNA; note = FH-MCP-MG153-133
atggactacaaagacgatgacgacaagtacccctatgatgtacctgattatgctgccagcaatttcacacagttcgtccttgtagacaacggcggcaccggggatgttacagtggccccgagcaatttcgcaaacggcgtagccgagtggatctcctctaatagcagaagccaggcttataaggttacatgctctgtaaggcagtcttccgcacaaaatagaaagtacacaatcaaggtcgaagtgcccaaggttgctacacagaccgttggtggagaggagttgccagtggctgggtggcgctcctacctgaatatggagttaacaatccccattttcgctaccaattcagactgtgaactcattgtcaaagctatgcaaggtcttcttaaggatggtaacccaattccaagtgcaattgctgctaattcaggcatttattctggcggcagcagcggcggctcaagcggaagtgaaacacctggaacttccgaaagcgctacgcctgaatcttctggtggatcttctggcggatcttccgcatgcgtcgacacccacgtgcaacttgacttcagtaacatcacattagagaggattctgagcccggacaacctcctggaggccttgaagagggtggaggccaacaaaggtgccccgggggtggacggcatgaggactgatgagctgcgagactatattaggcagcacccaggcgaactcacttctgttgttcgctctggaagatacaagccgtctccggtgaaacgcgtaaccattcccaaggccgagaagggtaagtttagggacctcggaatcccaactgttatcgacagactcgtgcagcaggccgtggctcagatcttgacaatttactacgatgagacctttagcgatgcttcctgtggatttagacccggtcgaggtgcccacgacgcaatttacaaatgtgtcgcacgtaccgctgagggctttgtttgggcagtggatatggatctggcgaagttcttcgacacagtgaatcattctaggctgattcgcaaactctccactcgtataaaagacaagcgtgtgataagcttaattcataggatgcttaagtccggtatcgacacgggaaaggaaatcataccaagtgaagtggggctgatgcaggggggaccactgagccccattcttgctaacatatatctggatgaactggacaaagagtttgaaaagaggaagctggtgcacataagatacgcagatgacgtgatttgcctctgcaggagtaagcgagccgctgagagagtgttagaatccataagcaggttcttagagcggcggatgctgctgaagataaaccgggaaaagagcggcgtcaaccacatcacaagaggtattaagttcctcgggtacgggttttatcgtgccgggaaaaagggaatccttcctacagttcactacaaatcaaaacggaggttcacagagacaataaaaaccgttctcagccgcaaccccaaaaggtccattgaggccgttaaagaggagctgagaactaagctgatgggatggaccgcctactttcagttggcatgttatgaggtttggaggcagaggacggatcagtggattcggcggcgcatcaggcagctgctgtggaagtgttggaagagagtaaggacacgataccgagctctgagaatgctggggtgttcccacgaagaggcttgcgagtgggcgaatacaagaaagagctactggagagtcgcggattcccacatactggcaacgacattaacaaacgacttcctgaagagtcatggttggacatggctggcccttagttgcaagacggtgggttgggaggatatctga

SEQ ID NO: 1775 - DNA, 1965 bp, synthetic construct
  source 1..1965: mol_type = other DNA; note = FH-MCP-MG153-134
atggactacaaagacgatgacgacaagtacccctatgatgtacctgattatgctgccagcaatttcacacagttcgtccttgtagacaacggcggcaccggggatgttacagtggccccgagcaatttcgcaaacggcgtagccgagtggatctcctctaatagcagaagccaggcttataaggttacatgctctgtaaggcagtcttccgcacaaaatagaaagtacacaatcaaggtcgaagtgcccaaggttgctacacagaccgttggtggagaggagttgccagtggctgggtggcgctcctacctgaatatggagttaacaatccccattttcgctaccaattcagactgtgaactcattgtcaaagctatgcaaggtcttcttaaggatggtaacccaattccaagtgcaattgctgctaattcaggcatttattctggcggcagcagcggcggctcaagcggaagtgaaacacctggaacttccgaaagcgctacgcctgaatcttctggtggatcttctggcggatcttccgcatgcgtcgacaaaactacggagagtgataagctgaaacatcggcaactgacggtgtgggattatctccggagggacacagccgagcaggaagagcaggctggcgtctgcgtgagccccagaatggatgagacagatactactaaccaacccgaacaaaaagaactcctggaacagatcctggcccccgaaaacttcgataaagccgttaaaagggtcaaggctaaccggggagcgggagggtcagacgggatgtccgtccatgaactggatgcttggctggaaggccaccaggaaaagctgcttgaaaggctgcggggcgggaagtaccacccccagcctgtccttagggtggagatccccaaggataatgggaagacccggaagctgggcatccctacagtagtagatagagccatccagcaggccataagtcaggttctgtcacccatatatgagcagcagttctctgaccgttcatacggcttcagaccgggccgaagtgcacatgatgcactgagacagtgcttagattatatcacagagggctaccgatgggtggtcgatatggacctcgagaagttttttgacaccgtgaatcagagcaaattgattcaggttctctctaataccgtgaaggacggaagggtcgtgtctttaattcacaaatatcttagggctgggatcatggtgaatggcatgtttgaagggtcaaaggaaggagtcccccaaggagggccgctttcaccacttttgggtaacattatgctgaacgaaagcgatcaagagctggaaaggcgggggcacagatttgtgaggtacgccgacgatatggtaatcttctgcaagtcccggaaagccgccgaacgcacattggttagtattacaaaatttattgagggcaagcttttcctgaaggtgaacagagagaagacgactgtggcctacgtgggcaagataaagtttctgggccacgggttctacgtagacaaggacggaggccagttgcgtgtacacccccagcgcgttgaaaagttcaaggccaaagtacggaagattactggaaggtcaaacggatggagtatacaaggccgcaaggcaaggctgaacgcactgatcaggggctgggtgaactattttaagctggctcgaatgaaaggcctgctgcagaagctggacgggtggattcggcggaggttgaggatggtgacctggaaaagatggaaaagggtgcgatcacgctttaccaatctgatgaaggccggtataagtaagtggtgggcatggcaatgggccaatacaagaagaggctactgggcgatcgcgggctctgtaatactcaccggcgctatacctaacgccctcctgacgaaggccgggtacctcaccctgtcagaatgttacgctaaggtgatggatatctga

SEQ ID NO: 1776 - DNA, 1809 bp, synthetic construct
  source 1..1809: mol_type = other DNA; note = FH-MCP-MG153-135
atggactacaaagacgatgacgacaagtacccctatgatgtacctgattatgctgccagcaatttcacacagttcgtccttgtagacaacggcggcaccggggatgttacagtggccccgagcaatttcgcaaacggcgtagccgagtggatctcctctaatagcagaagccaggcttataaggttacatgctctgtaaggcagtcttccgcacaaaatagaaagtacacaatcaaggtcgaagtgcccaaggttgctacacagaccgttggtggagaggagttgccagtggctgggtggcgctcctacctgaatatggagttaacaatccccattttcgctaccaattcagactgtgaactcattgtcaaagctatgcaaggtcttcttaaggatggtaacccaattccaagtgcaattgctgctaattcaggcatttattctggcggcagcagcggcggctcaagcggaagtgaaacacctggaacttccgaaagcgctacgcctgaatcttctggtggatcttctggcggatcttccgcatgcgtcgacggccagctcatgaaccagatcctgagtcgcgagaacatgaagatggcatataaaaaggtgaaggctaataaaggggctggcggcatcgacgggatctctattgaagatgttaataagtatctgaaggaaaactggatcgacatcaagacgaaaatactgaagcggaagtataagccacagcctgtacttagggtggaaatcccaaaaccaaatggcggtgtaaggaatctgggtattccaacagtagtggatcgcataattgaggaagctattgctcagattcttacaccaatgttcgagccgcagtttagcgaacattcatatgggttccgtcctggcagacgtgcccagcaggcaatagtcgagctgttagagtatcttaacgacggctacacttatattgtggatatagatcttgagaaattcttcgacaacgtcccacaggacaaactgatgtatcttgtgggcaaaactgtgaaagatcccgacgtgatcagtctggttactaaatatctccgtgccggcgtaatggtgaaagggaagtacgaagaaaccacaattggcactccacaaggtgggaatctttccccattgctctccaacattatgctgaatgagttagataaagaacttgaggcccggggcctgcacttcgtgcgctacgcagacgactgcatcattacggttgccagttctgctgcggcaaatagagtcatgcatactgtaacgtcctggatcgaacggaaactgagcctgaaggtaaacgctacaaagtctaaagtcactaaaccaaccggcttaaagtatctcggcttcgggtttgtcaaaatgaacggtaaatgggaggcaaggcctcataaggacagcattaaccggtttaaaaagaagttgaaaaaacttacttataggagctggtccgttagtatggattataggatcttacggctgaatcaggttattaggggctggattaattattttagaatcggcaagatgaagcagaatatgacaaagattgataaacaccttagaaatagaatgcgtatagtgatctggaagcagtggaagacatctaagaaacgtatgtggggccttaggaagttaggagtgcccgaatggatggcaaggcagtctgttggcttcgccgaccattaccaggctgtagctaagaccgccggcttgcggcggatcaccaaggagatccttgccaagcggggtttaatctcatgcttggactactacttaaacgatatctga

SEQ ID NO: 1777 - DNA, 1941 bp, synthetic construct
  source 1..1941: mol_type = other DNA; note = FH-MCP-MG153-136
atggactacaaagacgatgacgacaagtacccctatgatgtacctgattatgctgccagcaatttcacacagttcgtccttgtagacaacggcggcaccggggatgttacagtggccccgagcaatttcgcaaacggcgtagccgagtggatctcctctaatagcagaagccaggcttataaggttacatgctctgtaaggcagtcttccgcacaaaatagaaagtacacaatcaaggtcgaagtgcccaaggttgctacacagaccgttggtggagaggagttgccagtggctgggtggcgctcctacctgaatatggagttaacaatccccattttcgctaccaattcagactgtgaactcattgtcaaagctatgcaaggtcttcttaaggatggtaacccaattccaagtgcaattgctgctaattcaggcatttattctggcggcagcagcggcggctcaagcggaagtgaaacacctggaacttccgaaagcgctacgcctgaatcttctggtggatcttctggcggatcttccgcatgcgtcgacggggaaaagaggcaaaacaatcagctggagctggccttcatggcagaaatgaggtctgaagcccctaagacagcagcagaggggaccgaaacaagcattgccaaaaggacacccgaggacccagcactgcctgtacttctgatggaggaaattgttgagagagaaaatctgctgaaggcattgagacgagtgagtcggaataagggtggaccaggtattgatggaatgacggtgggaaagcttcctggatacttgaagaagcattggccaagaatacgtggccagttgctggccgggacgtaccagccggagcctgttaaaagagtggagattccaaaagccgatggtggaatgagaaaattaggtattccaactgtgctggacagattcgtgcagcaagcaatcatgcaagtccttcagaaatattgggataggacattcacggagcattcttacggctttcgccctgggaggagcgcccatcaggcagtttaccaggcgcaacagtatgttgagcagggatacagatgggttgtggacatagacctggagagatttttcgatagggtcaatcacgacaaattaatgggaaaactggcaaaacggatacacgacaaaaggttattgaaggtcgtacgtacttttctgaacgctggtgttatggaagacggcttggttagccccagtacccagggaacacctcaggggggccctctgtccccgctgctgtcaaacatctacctggacgaattggatcgggagctccagagaagggggcacagattcgtgaggtatgctgacgattgtaatatatatgtgcggtccgagcgagctgggaagagagtgatggaaagtattagtaaattcatcgcaggtaagcttaaactcaaggtcaaccagtctaaatctaaggtggataggacgtggagatgcaaatttctgggctttcgtcttctcccaggaaagcggattaagcgggggatcgccccaagttctgtcttgcgatttaaatccagggtcagacggcttacaaggcgcaataggtccgtaaagttgcaacagataattgagcaactgaatctttatattcgcggctggcggggatattttggcttttgccagacaccctctgtgctcgggaatctcgattgctggatccgacgtaggcttaggtgtatcgtctggaaacagtggaaaagagggacacgacgcttcgcggcccttcgatccatggacattaacaaatcccttgcagctcgaaccgcaggatcagtccatggcccttggagagtatctcgctcacccgctctgtcttttgcactgtcaaatggttacttcgatagcttgggcctggtgcacctgactgagctggggactgcggatatctga

SEQ ID NO: 1778 - DNA, 1902 bp, synthetic construct
  source 1..1902: mol_type = other DNA; note = FH-MCP-MG153-137
atggactacaaagacgatgacgacaagtacccctatgatgtacctgattatgctgccagcaatttcacacagttcgtccttgtagacaacggcggcaccggggatgttacagtggccccgagcaatttcgcaaacggcgtagccgagtggatctcctctaatagcagaagccaggcttataaggttacatgctctgtaaggcagtcttccgcacaaaatagaaagtacacaatcaaggtcgaagtgcccaaggttgctacacagaccgttggtggagaggagttgccagtggctgggtggcgctcctacctgaatatggagttaacaatccccattttcgctaccaattcagactgtgaactcattgtcaaagctatgcaaggtcttcttaaggatggtaacccaattccaagtgcaattgctgctaattcaggcatttattctggcggcagcagcggcggctcaagcggaagtgaaacacctggaacttccgaaagcgctacgcctgaatcttctggtggatcttctggcggatcttccgcatgcgtcgaccttcccaggcacttagtgaggattgtaaatcccaacgggggggtggtctataagcgcatagttgaagagcagttttccaacgaccaactgctggagcggatcctgagcacagaaaacgtgggactggcttggaagaaggtgagagccaataaaggagcacctggcatcgatgggatcactattgaagagttcccctttacttttcgggagtgctggcctgaaatccgatcaaccatcttggagggtcactacgtaccctctcctgtacaaagagtcgagatacccaagcccgacgggagcacccgacccctgggcattcctaccgtgttggatcgggtgatccagcaggcagttgctcaggtcatgggcccaattagtgatccgtggttctctgagtcctcatgcggattccgacccaggaggagtgcccatgacggcattaagcaaattaaacgctacatccggaaggggtacaaggtttcagtagatatggacttgtctaagtttttcgacacagtaaatcacgatgtgctgatgcaccgcgtggcccggaggatagaggacaagcgagtgctgaaacttataggtaaatatttgagggcaggtgtgatggtaaaaggacgaaggctggctacacctcttggtgttcctcaagggtggcctttgtcacctcttttggccaacatcctgttagacgatttagaccgagagctggagaatagggggcaccatttcgtgcggtacgcggatgactttattatcatggtgaagtctcttagcgccggccagcgggtgatggggtctatacacagattcctggaacgagaactgagattgactgttaatgaaaaaaaatccaaggttggccctgctgaagagtgtggcttcctggggttcgtctttgtcaggggcaaaatccgctggagtgataaggccttccgggagtttaagaggcgcattcggttatttactggaaggagttggttcgtgagcatggaatatagattattgaagctggccgagtacgtccgaggatggatgaattactacggaatctccgagtattatcgtccaatcccagaaatcgacgagtggctccggcggcggctgaggatgtgtttctggaagcagtggagatatacacggacaaaggtatataaccttctgaagctggggacgagcaagcgacaggctatcatgacagctctttccaggaaaggcccgtggcacctcgcacggcctctggcaacccaggtcgggatgacaaataaatggctgaaagaacaaggcctgatctccgttaaagaccagtgggtcaagatccattatcctgcttccgctgatatctga

SEQ ID NO: 1779 - DNA, 2025 bp, synthetic construct
  source 1..2025: mol_type = other DNA; note = FH-MCP-MG153-138
atggactacaaagacgatgacgacaagtacccctatgatgtacctgattatgctgccagcaatttcacacagttcgtccttgtagacaacggcggcaccggggatgttacagtggccccgagcaatttcgcaaacggcgtagccgagtggatctcctctaatagcagaagccaggcttataaggttacatgctctgtaaggcagtcttccgcacaaaatagaaagtacacaatcaaggtcgaagtgcccaaggttgctacacagaccgttggtggagaggagttgccagtggctgggtggcgctcctacctgaatatggagttaacaatccccattttcgctaccaattcagactgtgaactcattgtcaaagctatgcaaggtcttcttaaggatggtaacccaattccaagtgcaattgctgctaattcaggcatttattctggcggcagcagcggcggctcaagcggaagtgaaacacctggaacttccgaaagcgctacgcctgaatcttctggtggatcttctggcggatcttccgcatgcgtcgacagcaaggtgaaaaaaactgctaaccctggcaaaattaatcgagatttgcccgaggaagatggagccgagctcaggtcaactttgggcgagagttcatttgcctctgcgctgcccgatgaaaaagaccgaattacgatggatacaagtaaactgttggagaaggtaattgacaggaacaacttaaatttggctttcaagcgcgtgaaaaaaaatgggggctcacacggcgtggacggtatgaaagtcgaagagctgctcccacatctcaaacagcatggagaacagatcaagagggaccttttagagggcaagtataggccccagcccgtgagaagggtagagattcccaaaccaaacggtgggggagttaggcttctcggaatccccgcagttgtcgataggatgctgcagcaagcgatcgcccaagtactgacacccatatttgagaaagaattttcagattatagttatgggttccggcccggcaagtctgctcatgacgcaattaagcaggctcaggtgtatttaaacgaggggtatactacagtggtcgatatagatctcgagaacttctttgacagagtcaaccacgacaaactgatgtacctgttgagcaagcgaatctcagacaagaggctcctgaagctcatccggagatacctcgaaagcggtgtcatggtgggcggcctggtttccccctctagggaggggactgtacagggcggacctttgagcccgctgctctccaatgttatgttgcatgaactggacatggaactggagaaaaggggccatagattctgtcgatacgctgatgactgcaattgctatgtgaaatctaggagagctggagaacgcgttatgtccagtataagtgaatttattgaacagaggctgaaactgaaagtgaatagggacaaaagcgcagtggattatgtcaaccgcaggaaattcttgggtttctcattctaccgcgccaaaggcgaataccgcattagagtggacgccaaaagccttaagaggctgaaggacaaactcagactgctgacttaccggtcaaacggctggtccattgacgcgagaatatacagattaaaccaggtaattcgggggtgggtcaactacttctctttagctgacatgagatcccactgtttactcctggacgaatggctgcgcaggagactcggcatgtgctattggaagcagtggaagaaggttaagacaaagcacaccaatttagttaaactgggaatacccgtctggaaagcttgggaatatgctaactctcgcaagggctactggcacattgcgaactcctggatcatgcatcgaagtctgaccaatgcgtacttggaaaaggccgggcttcactccctttcatacgtgtacttcaatctgaatttgactaaccgacgtatgcccaacggaacatacgggggcgtccgggggcagcaagtgaacgatatctga

SEQ ID NO: 1780 - DNA, 1929 bp, synthetic construct
  source 1..1929: mol_type = other DNA; note = FH-MCP-MG153-139
atggactacaaagacgatgacgacaagtacccctatgatgtacctgattatgctgccagcaatttcacacagttcgtccttgtagacaacggcggcaccggggatgttacagtggccccgagcaatttcgcaaacggcgtagccgagtggatctcctctaatagcagaagccaggcttataaggttacatgctctgtaaggcagtcttccgcacaaaatagaaagtacacaatcaaggtcgaagtgcccaaggttgctacacagaccgttggtggagaggagttgccagtggctgggtggcgctcctacctgaatatggagttaacaatccccattttcgctaccaattcagactgtgaactcattgtcaaagctatgcaaggtcttcttaaggatggtaacccaattccaagtgcaattgctgctaattcaggcatttattctggcggcagcagcggcggctcaagcggaagtgaaacacctggaacttccgaaagcgctacgcctgaatcttctggtggatcttctggcggatcttccgcatgcgtcgacgggtctgagaaaacacagccaaagagagccggaaccgggcagaatagtggcgagacaggaattggagcaagttccctgtccgcttcaatgggtcgctctggggctgaagttgcagagatgatggaaagagtagtcgaaagcagtaacatgcgcaaagcctattggagggtcgtgggaaataagggtagtgccggggtggacggcatgactgtggccgagctgaagggccacttgcaagctaactgggccattctgaaagagcgcctcctggcaggtacctacatcccatcccctgtgctgcgcgtggaaatccccaaaccagggggtaagggcttgagacctttggggatcccaactgtcactgatcgggtgattcagcaggccctgcaccaggtcatggtgccactgtgggacaaagagtttagcggttatagctatggcttccgtgcgggaagaagtgcccatcaagcaattagacagtccagagaatatgtggcggaaggccgacggtgggtcgttgacatggatttggagaaattctttgatagggtaaatcacaacattcttatggacagagtggcccggaaagtacgagataagcgagttcttaagctcatccgaaggtacctgaaagccggaatactcgtgggtggagttgtggaagtgccacagcagggcacaccacagggaggacccctttcccctctgttgtcaaatattctgttagacgaccttgacaaagagttggaacgccgcggacacgcattctgcaggtacgcagacgattgcaatatatacgtgcgctcccgcaaggcaggtgaaagagtcctgtcttcaataagtaggtacctggaggaagaacttaagctgaaagtcaataaggagaaaagcgcagtcgatcggccctggaggagaacttttctgggctataccatgacctggcacaaggagcccaggctgagggtcggccctgaggccatccggagacttaaaggcaaggtaagaaagcttgcagccagcggcagggggaggtcccttaggtacacaattagcctgctgacacccttactgcgtggctggtacaattatttttccctcgcccaggtgcggaatatcttcgaagagctcgacggctggatccggcgccgcttacggtgtattctttggaggcagtggaagcgctcattcacccgagctcgtaatctcatgaaacgcggtttgtcagaagaaagaagctggaggtctgctaccaatggcagaggaccctggtggaactccggcgcaagtcacatgaacagggcctatcctaaatcctatttcgattgcctgggactgtatagtttcctcgaccaccacgtggtcacatctgatatctga

SEQ ID NO: 1781 - DNA, 1890 bp, synthetic construct
  source 1..1890: mol_type = other DNA; note = FH-MCP-MG153-140
atggactacaaagacgatgacgacaagtacccctatgatgtacctgattatgctgccagcaatttcacacagttcgtccttgtagacaacggcggcaccggggatgttacagtggccccgagcaatttcgcaaacggcgtagccgagtggatctcctctaatagcagaagccaggcttataaggttacatgctctgtaaggcagtcttccgcacaaaatagaaagtacacaatcaaggtcgaagtgcccaaggttgctacacagaccgttggtggagaggagttgccagtggctgggtggcgctcctacctgaatatggagttaacaatccccattttcgctaccaattcagactgtgaactcattgtcaaagctatgcaaggtcttcttaaggatggtaacccaattccaagtgcaattgctgctaattcaggcatttattctggcggcagcagcggcggctcaagcggaagtgaaacacctggaacttccgaaagcgctacgcctgaatcttctggtggatcttctggcggatcttccgcatgcgtcgacatcgagaacgagaacaagacagtgggagtgtcttatggtaccaagcagacggaggagacacggttgtgggactgggtagagaggagcatctggactgaccggatgcttgaggccttagaaaccggggtcaagggaggcgtctggttctcccttatagataaagtttatagacctcaaacactgtacgccgcatggaaggcggttaagcggaacagaggaagcgcaggaacagaccacgagtccatcgaacgatttgaacagaagctggaagagaacataaaaaaattgagcgaggagctccggactggcacctattacccaaggcccatcaagaggcgctatatcgacaaaccaggttccaaggagaaacgccctctggggatccccgccgtaagggatagggttgtgcagacaacaatcaggctcgtaatcgagccgatctttgagcgacagtttagggactatagctacggatttcgaccgaaacgcggttgcaaggatgcacttagagaagtggaaaaacggttgaaagctggatactcccacgtcgtggatgcagacctgaaaacttattttgactccatcccccacgaccgcctgatgcaggatgtgcagcggtatatcgccgacgggagagtcttaaaactgatcaagaatttccttaaacaggacgtgttagacggcctcgcccaatggactcctgaagccggcactccccagggtgctgttattagccccatgttggccaacctttaccttcatccagttgaccaggcaatggaagaggccggatttataatgattcggtacgcagatgattttgtgattatgtgtaaagacgaaaaggaggcaaaacaggccatgtgcaaagtttctcagttgatcaccgaacggggactggtgctccatcctgagaagacatgtattgtgaacactaacgaggccggtcaagggtttgatttcctgggttatcacttcgaaaggggaacccgctggccaaggaagaagtctttaaaaaagctgaaggacactatccggagccagacaggccgcagcaatggacacagcatggcggtgatcaccgccaacttgaataggactctcaggggctggtttgagtatttcaagcatagccacaaatggaccttccggatactggatggctggattagaaggcgactgcggtccatcctgagaaagcggaacaaaggcgctaaaggcatttccggaaagatggaccattttcggtggcccaacaaattcttccaggaactgggtctgtactccctggaagaggcccacgatctgttgttccaatctagtagaagagatatctga

SEQ ID NO: 1782 - DNA, 1959 bp, synthetic construct
  source 1..1959: mol_type = other DNA; note = FH-MCP-MG153-141
atggactacaaagacgatgacgacaagtacccctatgatgtacctgattatgctgccagcaatttcacacagttcgtccttgtagacaacggcggcaccggggatgttacagtggccccgagcaatttcgcaaacggcgtagccgagtggatctcctctaatagcagaagccaggcttataaggttacatgctctgtaaggcagtcttccgcacaaaatagaaagtacacaatcaaggtcgaagtgcccaaggttgctacacagaccgttggtggagaggagttgccagtggctgggtggcgctcctacctgaatatggagttaacaatccccattttcgctaccaattcagactgtgaactcattgtcaaagctatgcaaggtcttcttaaggatggtaacccaattccaagtgcaattgctgctaattcaggcatttattctggcggcagcagcggcggctcaagcggaagtgaaacacctggaacttccgaaagcgctacgcctgaatcttctggtggatcttctggcggatcttccgcatgcgtcgacaaggtgtctcagaataatcagcggctgcaaaaaacaaaatacctgggcagttccgctgaagacagagtcgagctggaggataaacagcgggttcacaggaagttcagcgcaaccacaaatggcggcacaaacgagtttcagtacggctcattggaaaggatcttaagcattaataacgtcgtgtctgctatgaagagagtgatcgccaacaaggggtctcatggcgtcgatgggatgactgtatatgaactgaagcagttcttgaatatgaattggtcaaacatccgagagaatattctcaatggtgagtataagcccatgcccgtcagacgggtggagattccgaagcctaacggcggcacccgtctcctgggcattccaactgttctggatagggtcatacagcaggctattgcccaggagttgaataatatatacgataagaaattctcccagaactccttcggtttccgcccccgaagggatgcgaagggagccatcaagaaggccgaaagctatatcaacgaaggctaccgatgggtggtggacattgaccttgagaaattttttgacaaagtgaaccacgacattttgatgtataaactgtcaatggatattaacgataagcgggtgttgaagctgatccggaggtatctgcagagcggtattatgataaatggggttgttgtgacaaacgaggagggaaccccgcaaggtggccccttatcaccgctcctcagtaacatcatgctcgatgagctggacaaggagctcgagaagaggggccatcgattctgtagatatgccgatgattgcaatatctacgtgaagtcaaagcgagcaggagaacgtgttatggagaatataaccactttcattgaagacaagctgaaactcaaagtaaataaggacaaatctgccgtggaaagaccttggaagaggaagttccttggtttcacactgaatttgatgtttggcaaagcatacagctccatatctaaacaatcactgaagcggcacaaagagaaattaagaaatattttatccagaagtaagcctataccactggaacaacggatcaacaaacttaaccaggtgaatattggatgggtgaactactatggcattgccaaatgcaaagggatcctgggccagctcgacacctggattaggcagaggctgcgcatgtgcatctggaagcagtggaagaaagtgcgcacaagataccggaacctgaaaaagcttggtctgacacattatcaagcgatcaaattcgccaataccagaaagggatattggcgaattgcgaacagcgcaatccttaatatcaccctgaccaatcaattttttacagatttaggcttaaaaagccttactcgccaatacatcaaaattcatgatatctga

SEQ ID NO: 1783 - DNA, 1572 bp, synthetic construct
  source 1..1572: mol_type = other DNA; note = FH-MCP-MG173-1
atggactacaaagacgatgacgacaagtacccctatgatgtacctgattatgctgccagcaatttcacacagttcgtccttgtagacaacggcggcaccggggatgttacagtggccccgagcaatttcgcaaacggcgtagccgagtggatctcctctaatagcagaagccaggcttataaggttacatgctctgtaaggcagtcttccgcacaaaatagaaagtacacaatcaaggtcgaagtgcccaaggttgctacacagaccgttggtggagaggagttgccagtggctgggtggcgctcctacctgaatatggagttaacaatccccattttcgctaccaattcagactgtgaactcattgtcaaagctatgcaaggtcttcttaaggatggtaacccaattccaagtgcaattgctgctaattcaggcatttattctggcggcagcagcggcggctcaagcggaagtgaaacacctggaacttccgaaagcgctacgcctgaatcttctggtggatcttctggcggatcttccgcatgcgtcgacgagaagaatttgaagtctgtgtatcttggcagactccagaatgcactggaggcccagcaaaggacgaaggaagaaatcatcacatgtacacaatatgcccagaaactcatggctgataatttgccagtcctttttgaagagaatcacgtttaccaggtgctgaaatggaagaagagtaaccagcagcagtaccacaccttctatctggtgcagaaagggaaggaaagaaagataactgcccccagccgagagctgaagcggcgacaacggtggattctggacaacattttgattaaactgaaggtgtcagattacgcacatggatttgtgaaaaacaggtcaattcggaccaatgcagaacttcatatgactcacgactatgcactgtgtatggatatagaggatttcttcccatctattaaggaggataccgtcaaggaggtcttcgccagagctggctacagccgccgcgccgccaatgctcttgctgacatgtgctgctattttggggcccttcctcaaggggccccaactagtccttatctcgcaaacctcgtcttcatcgaaaaggaccacgaactggccctgcttgcaaaacagcatgacgcaacctattccaggtacgctgacgatctcacattttcatccgacaaccctctggggaaccttagcgaggctgtgaatcaggttttgcagaataatggattcaggctgaacgactctaaaaccaaggagttttttcctggacagcccaaaaggattacaggtttgatagtacagaatggattgatcagagttcccagaaagttcaaacggacactcaaacaggagatctattattgcaagaaatacggtgtggctctgcacctggagaacactcgagctcataaagctatcaactaccgcgaatacctttacggcaaggcctactatgtaaacatgattgaacccgaacttggcaaacactatctgaaacaactggatgagatcctctggccgtcctactaccttgatatctga

SEQ ID NO: 1784 - DNA, 1569 bp, synthetic construct
  source 1..1569: mol_type = other DNA; note = FH-MCP-MG173-2
atggactacaaagacgatgacgacaagtacccctatgatgtacctgattatgctgccagcaatttcacacagttcgtccttgtagacaacggcggcaccggggatgttacagtggccccgagcaatttcgcaaacggcgtagccgagtggatctcctctaatagcagaagccaggcttataaggttacatgctctgtaaggcagtcttccgcacaaaatagaaagtacacaatcaaggtcgaagtgcccaaggttgctacacagaccgttggtggagaggagttgccagtggctgggtggcgctcctacctgaatatggagttaacaatccccattttcgctaccaattcagactgtgaactcattgtcaaagctatgcaaggtcttcttaaggatggtaacccaattccaagtgcaattgctgctaattcaggcatttattctggcggcagcagcggcggctcaagcggaagtgaaacacctggaacttccgaaagcgctacgcctgaatcttctggtggatcttctggcggatcttccgcatgcgtcgacagctatgtccagaagctcaaggataagatggtggagcagggcgaggatgagaactacgtggagctgtgcgtaagctatacccaaaaactgtgcaataacagtgtacccgttattttcgacttcaagcacctgagtctgctgctcggctacgaaccgccagaacttgcattctacctcttcgcccctgaggactcattttacaccaaaatgcaaatccctaagaagtctggtggaatgcgcgagatcgagataccctctgacaaacttaaaagcatacagcgatggattttgcggaacgttctcgagaatatcgaggtgcatgaatcctgttacggctttactaagggcaaatctatctatgacaatgcacttcttcatgttgggaaggaatgtgtcctgaatatggacctgaaagactttttcccttcaattactcagaaagctgtgtttaatattttctaccagaaaggatacactaaaagcgtcagttattatcttgctaaacttttgacaaaagacggagtgctccctcaaggctccccagcaagccccaaaatttctaacatcgttgctctgcatctcgataagaggctgtccgaattggccaagtgctacaaagcaacatattccaggtacgccgatgatctgaccttttctggagctagtaacatcaaaaatatgataccaattattacacagatcatacacgaggaggccttcttcgtaaatgagaagaagacgagatactcatattattttcagaagcaggaagtcactggtctgatagtcaataagaaggtgtcagtgcccaaagaatatctcagagaactgaacaaggagatttactattgtaaaaagttcggggtgagctcacaccttaccaagattgaaaaccacaaatccttttttaaggagtacatgtatgggaaagcctactttgtgaacatgatcgataaggaattggggcagaagatcctttgcgaactggatacaatcttgtgggaatatgatatctga

SEQ ID NO: 1785 - DNA, 2457 bp, synthetic construct
  source 1..2457: mol_type = other DNA; note = FH-MCP-MG159-3
atggactacaaagacgatgacgacaagtacccctatgatgtacctgattatgctgccagcaatttcacacagttcgtccttgtagacaacggcggcaccggggatgttacagtggccccgagcaatttcgcaaacggcgtagccgagtggatctcctctaatagcagaagccaggcttataaggttacatgctctgtaaggcagtcttccgcacaaaatagaaagtacacaatcaaggtcgaagtgcccaaggttgctacacagaccgttggtggagaggagttgccagtggctgggtggcgctcctacctgaatatggagttaacaatccccattttcgctaccaattcagactgtgaactcattgtcaaagctatgcaaggtcttcttaaggatggtaacccaattccaagtgcaattgctgctaattcaggcatttattctggcggcagcagcggcggctcaagcggaagtgaaacacctggaacttccgaaagcgctacgcctgaatcttctggtggatcttctggcggatcttccgcatgcgtcgactcagatcaagctcgacgagctgcaatccaagctaggattgcccagtcctcccgcgacgatgttattctcgacgaaatgattcgactggggttctgggatgccggaggtgacccacacgcagccgagcttactgagatcatggcccgaagcaaagaaatcagaagtgagcttagtcagcttaatagccagaatgcacgatacctcgacccggaggccgctctgaaggcaatgcacgctgaacggaaagcagccgccctggcccgccggaaggagacaaaacttgccagggcccgcgcccggcaggctcgagcagaagcctgggcccaacggtccagggatgctgtgtggcatctgggtcccggagtgagcgctgcacttgaacagggcgagggtaaatccgctccaagatctcttgctcctggtcttcccgccttggccactcctgcagctgtcgcatcagctatgggggtaagcacaggagaactccggttcttggcttatgcaagacccatgagtcgggtgagccactacaagcgctttgagataaccaagaagtctggcggcaaacgagttataagcgctccaatgccccgactgaagtatgcacagtactggttgctggatgctgtgctgtcaaagctgcctctccaccctgccgcccatgggtttgtccctggcagaagcattctgaccaacgctcgacctcatgtaggacgagacgtcgtggcaaacatggacctgcgcgacttttttcccaccctggatgacaggagggttaagggcctgttcgagtctctcgggtacggtgaagacgtggcacaagtgctcgctctgatagccaccgaacccgtgaccgatgaaatcgaaattgatggcagggtgacccacttggcaaggtcacctagaagacggctcccacagggggcaccgtgctcaccagccatcaccaatcttatttgtaggcgacttgacgccagacttgcaggactggccgctaaactgggctttgcctatacacgctatgccgatgatctcacattttccgcctcaggcgaagacgctaaaaaggtaggcgcccttctccgcgccgcccaggaaatcgtgagggccgaggggtttgaaccccatccagacaagacgagggttatgagaagaggggcccggcaggaggttacagggctcgtcgtgaacgatagacttggtgcacctagagaagcagtcagacgagcccgagctgcattgcaccgggccgagcggcaaggagtcgccgggcttaaattcggcagtggccgggacgctttggcaggactggtaggcttcgcccagttcgtcgctatgattgaccctagacagggcgcttccttggttgctagagctcgggcacttagaaggggcgcagatgaaggtgccacttctatgctgagtagggctggcctggcaagggctggattgggtgcagctgctctgcgcaaagccgccgctgctggggctcccccagaagctatgcgctggcgccctgccgaaaggccagcaccgacgctcgatcccgtgctggtcgaggccgagagagctgctgccgccaaagcccgcagggaggccgagaaggaggggagtaggcaggcaaagtccgctaggagcggaacgtctgtgccgcctgtgcggggagccggaactggcgcaagtggaggagggggacccgctcgcgctgtttgggggcgcaccgcaacacccgagctcggagagtcttccgccgagtgggctagacctgccactccaagacggtctttctggtcacttgctgtgacaggttggttgatcttgatggccttggctgtactgccattcgcaccatggctgactgcactgcttggctatctggtgtaccggagacttcgggatatctga

SEQ ID NO: 1786 - DNA, 3084 bp, synthetic construct
  source 1..3084: mol_type = other DNA; note = FH-MCP-MG140-3N1TrimED
atggactacaaagacgatgacgacaagtacccctatgatgtacctgattatgctgccagcaatttcacacagttcgtccttgtagacaacggcggcaccggggatgttacagtggccccgagcaatttcgcaaacggcgtagccgagtggatctcctctaatagcagaagccaggcttataaggttacatgctctgtaaggcagtcttccgcacaaaatagaaagtacacaatcaaggtcgaagtgcccaaggttgctacacagaccgttggtggagaggagttgccagtggctgggtggcgctcctacctgaatatggagttaacaatccccattttcgctaccaattcagactgtgaactcattgtcaaagctatgcaaggtcttcttaaggatggtaacccaattccaagtgcaattgctgctaattcaggcatttattctggcggcagcagcggcggctcaagcggaagtgaaacacctggaacttccgaaagcgctacgcctgaatcttctggtggatcttctggcggatcttccgcatgcgtcgaccctggcaaggaaggccggcggattcagcgtcgaaaacgtgaacggctgcccccacgcaatgcaaaacagaagcgggccgcagaatttcgggtgctgcaggagctgtggcggaaagatcgttcaagacttgcaaccgtcatccttgataagatgccacctacggctaaagaaccgccgattggcgatatagaaaaggtgtatactaccaggttcgaacggcccagtccagaggaccaacatgagtttacgtccaagcctattgaggagcctatggagatggtacggtttatcacagttgaggaagttcttaagaatttaaaagccatgaagtctaacaacgcccccgggttggactctaacataacaatgaagcgtcttcggtccttgccgttgccctgccttcagctcgtctttaattgttggttggccatcggaaaggctccacagagtatgaaacaatgtcggagcaagctgcttcccaaaggggccgaaggtctggatgatgtaaataattggcgtcctttgaccataggctctctcttgatccggttatatacccggatccttgctatgcgcttacagtctaaagtccagctgcatcccagacaaaaggcctttcaacctttggacggatgcggagaaaatatcgcaatagtgtcatctttgctgcaagatgcgcacgaacgcaagaaagaattaaacatcatatttctggacatcgcgaaggcttttgattgcgtgtcacatcacagcattcaacgggcactgaatagatttggcttgccacgcgcttttcgacgtgtgatcgaagatctgtatgatggtgccacaacagtgtttcaaacatcagagggcgatagcaagacccttgggattagctctggagtaaaacaaggttgtcccttgtcccccgtccttttcaatatggtcatggacgaactcatcgctgacgcaccctctacggagtggggctatgagcttcacgacgaatccgtcgggctcctggcatttgctgacgacattgccctggtgagccattctagggcaatgatgtcacacgcgcttgattatgctgcaggcttcttcgaaaagagaaacttacaactgaacgccaggaagtgtattgggcttagtatcaagaaagctccccgccgaaaggttatgcggatcgaaatggggagtatctggagtctccgcaatgggtctgacaacattcccatcaaaatgctttctcccgccgacatggctcgctatcttggagccctgttttccccgtctgggaagcaaacaattgatctcgccactatgaagggctggattacgtccatagaaaagagcagactcaaaccgcaccaaaagttggtgatgctgcgaacgtaccttcttccgagggtactccatcacctcactattggagaaccaaacgcaactaccttgcgtcgggttgagagggaactgcgcaattcagtgaagcggtttctcaaattgcctgtggccactgccacacccttctttcatattagcacaaaagagggtggactcgagttaccacctttgctcgagaccatagcaaaacgaaaactgaagtgggaaataaggttacagaaatcaaaggattccttgattcgagccgtcgctgactctccaaaattccgtaaacaatttgacaaagctcgggcctggattggagtgccggtgattaatcgaccaagtgacatcaataggcgaatccgagagctgaataacggcaggtttgaaaggttcacgtctgagctggctgtccaatcccggtgtcatagggctctggccagcaatcccttgcgaaatgattggctgaccggacacaaccccgggctttacgcatcacaatttatagacgcattgaaacttgtcactagccaactgcccacccgcgaagcactgaatcggggaaacccccaggccgataaaaggtgtcggggctgtggattctccgtagagaatcaaaagcacgtcatcagtaattgtcccctggtccaacaagagcgtcatctgcgccataatcgtgtcgcccagctgtttgctcgttacgccaaagagaaaggatggaatattatagcagaacctcggatcaggaatcccagcggcgaaatcatgcgtccggccatcgttctgcggcgagatgataacgtagctatcgtagacatccaaatcccttatgaagacggcggtcgcgaacaattggctgaacgatatagacaaaagtgcagcaaatatcggcagttaagcacccacattcagcatgtgctgggagttaccaatcataccattggtgcgattattgttggtgcttgtggcacatggtgcgagcttaacaatcccatcttggattacataggagtcaatactacagccataaagaagaatctcagcattgaagctttgaggggcacactgaaaatattcggccaatttaagaatagggtgtttagaaatgagagagtgcatccatcacagcggccaagctccggcccaccagtaccagatatctaa

SEQ ID NO: 1787 - DNA, 3045 bp, synthetic construct
  source 1..3045: mol_type = other DNA; note = FH-MCP-MG140-3N2TrimED
atggactacaaagacgatgacgacaagtacccctatgatgtacctgattatgctgccagcaatttcacacagttcgtccttgtagacaacggcggcaccggggatgttacagtggccccgagcaatttcgcaaacggcgtagccgagtggatctcctctaatagcagaagccaggcttataaggttacatgctctgtaaggcagtcttccgcacaaaatagaaagtacacaatcaaggtcgaagtgcccaaggttgctacacagaccgttggtggagaggagttgccagtggctgggtggcgctcctacctgaatatggagttaacaatccccattttcgctaccaattcagactgtgaactcattgtcaaagctatgcaaggtcttcttaaggatggtaacccaattccaagtgcaattgctgctaattcaggcatttattctggcggcagcagcggcggctcaagcggaagtgaaacacctggaacttccgaaagcgctacgcctgaatcttctggtggatcttctggcggatcttccgcatgcgtcgacgaacggctgcccccacgcaatgcaaaacagaagcgggccgcagaatttcgggtgctgcaggagctgtggcggaaagatcgttcaagacttgcaaccgtcatccttgataagatgccacctacggctaaagaaccgccgattggcgatatagaaaaggtgtatactaccaggttcgaacggcccagtccagaggaccaacatgagtttacgtccaagcctattgaggagcctatggagatggtacggtttatcacagttgaggaagttcttaagaatttaaaagccatgaagtctaacaacgcccccgggttggactctaacataacaatgaagcgtcttcggtccttgccgttgccctgccttcagctcgtctttaattgttggttggccatcggaaaggctccacagagtatgaaacaatgtcggagcaagctgcttcccaaaggggccgaaggtctggatgatgtaaataattggcgtcctttgaccataggctctctcttgatccggttatatacccggatccttgctatgcgcttacagtctaaagtccagctgcatcccagacaaaaggcctttcaacctttggacggatgcggagaaaatatcgcaatagtgtcatctttgctgcaagatgcgcacgaacgcaagaaagaattaaacatcatatttctggacatcgcgaaggcttttgattgcgtgtcacatcacagcattcaacgggcactgaatagatttggcttgccacgcgcttttcgacgtgtgatcgaagatctgtatgatggtgccacaacagtgtttcaaacatcagagggcgatagcaagacccttgggattagctctggagtaaaacaaggttgtcccttgtcccccgtccttttcaatatggtcatggacgaactcatcgctgacgcaccctctacggagtggggctatgagcttcacgacgaatccgtcgggctcctggcatttgctgacgacattgccctggtgagccattctagggcaatgatgtcacacgcgcttgattatgctgcaggcttcttcgaaaagagaaacttacaactgaacgccaggaagtgtattgggcttagtatcaagaaagctccccgccgaaaggttatgcggatcgaaatggggagtatctggagtctccgcaatgggtctgacaacattcccatcaaaatgctttctcccgccgacatggctcgctatcttggagccctgttttccccgtctgggaagcaaacaattgatctcgccactatgaagggctggattacgtccatagaaaagagcagactcaaaccgcaccaaaagttggtgatgctgcgaacgtaccttcttccgagggtactccatcacctcactattggagaaccaaacgcaactaccttgcgtcgggttgagagggaactgcgcaattcagtgaagcggtttctcaaattgcctgtggccactgccacacccttctttcatattagcacaaaagagggtggactcgagttaccacctttgctcgagaccatagcaaaacgaaaactgaagtgggaaataaggttacagaaatcaaaggattccttgattcgagccgtcgctgactctccaaaattccgtaaacaatttgacaaagctcgggcctggattggagtgccggtgattaatcgaccaagtgacatcaataggcgaatccgagagctgaataacggcaggtttgaaaggttcacgtctgagctggctgtccaatcccggtgtcatagggctctggccagcaatcccttgcgaaatgattggctgaccggacacaaccccgggctttacgcatcacaatttatagacgcattgaaacttgtcactagccaactgcccacccgcgaagcactgaatcggggaaacccccaggccgataaaaggtgtcggggctgtggattctccgtagagaatcaaaagcacgtcatcagtaattgtcccctggtccaacaagagcgtcatctgcgccataatcgtgtcgcccagctgtttgctcgttacgccaaagagaaaggatggaatattatagcagaacctcggatcaggaatcccagcggcgaaatcatgcgtccggccatcgttctgcggcgagatgataacgtagctatcgtagacatccaaatcccttatgaagacggcggtcgcgaacaattggctgaacgatatagacaaaagtgcagcaaatatcggcagttaagcacccacattcagcatgtgctgggagttaccaatcataccattggtgcgattattgttggtgcttgtggcacatggtgcgagcttaacaatcccatcttggattacataggagtcaatactacagccataaagaagaatctcagcattgaagctttgaggggcacactgaaaatattcggccaatttaagaatagggtgtttagaaatgagagagtgcatccatcacagcggccaagctccggcccaccagtaccagatatctaa

SEQ ID NO: 1788 - DNA, 3030 bp, synthetic construct
  source 1..3030: mol_type = other DNA; note = FH-MCP-MG140-3N3TrimED
atggactacaaagacgatgacgacaagtacccctatgatgtacctgattatgctgccagcaatttcacacagttcgtccttgtagacaacggcggcaccggggatgttacagtggccccgagcaatttcgcaaacggcgtagccgagtggatctcctctaatagcagaagccaggcttataaggttacatgctctgtaaggcagtcttccgcacaaaatagaaagtacacaatcaaggtcgaagtgcccaaggttgctacacagaccgttggtggagaggagttgccagtggctgggtggcgctcctacctgaatatggagttaacaatccccattttcgctaccaattcagactgtgaactcattgtcaaagctatgcaaggtcttcttaaggatggtaacccaattccaagtgcaattgctgctaattcaggcatttattctggcggcagcagcggcggctcaagcggaagtgaaacacctggaacttccgaaagcgctacgcctgaatcttctggtggatcttctggcggatcttccgcatgcgtcgaccgcaatgcaaaacagaagcgggccgcagaatttcgggtgctgcaggagctgtggcggaaagatcgttcaagacttgcaaccgtcatccttgataagatgccacctacggctaaagaaccgccgattggcgatatagaaaaggtgtatactaccaggttcgaacggcccagtccagaggaccaacatgagtttacgtccaagcctattgaggagcctatggagatggtacggtttatcacagttgaggaagttcttaagaatttaaaagccatgaagtctaacaacgcccccgggttggactctaacataacaatgaagcgtcttcggtccttgccgttgccctgccttcagctcgtctttaattgttggttggccatcggaaaggctccacagagtatgaaacaatgtcggagcaagctgcttcccaaaggggccgaaggtctggatgatgtaaataattggcgtcctttgaccataggctctctcttgatccggttatatacccggatccttgctatgcgcttacagtctaaagtccagctgcatcccagacaaaaggcctttcaacctttggacggatgcggagaaaatatcgcaatagtgtcatctttgctgcaagatgcgcacgaacgcaagaaagaattaaacatcatatttctggacatcgcgaaggcttttgattgcgtgtcacatcacagcattcaacgggcactgaatagatttggcttgccacgcgcttttcgacgtgtgatcgaagatctgtatgatggtgccacaacagtgtttcaaacatcagagggcgatagcaagacccttgggattagctctggagtaaaacaaggttgtcccttgtcccccgtccttttcaatatggtcatggacgaactcatcgctgacgcaccctctacggagtggggctatgagcttcacgacgaatccgtcgggctcctggcatttgctgacgacattgccctggtgagccattctagggcaatgatgtcacacgcgcttgattatgctgcaggcttcttcgaaaagagaaacttacaactgaacgccaggaagtgtattgggcttagtatcaagaaagctccccgccgaaaggttatgcggatcgaaatggggagtatctggagtctccgcaatgggtctgacaacattcccatcaaaatgctttctcccgccgacatggctcgctatcttggagccctgttttccccgtctgggaagcaaacaattgatctcgccactatgaagggctggattacgtccatagaaaagagcagactcaaaccgcaccaaaagttggtgatgctgcgaacgtaccttcttccgagggtactccatcacctcactattggagaaccaaacgcaactaccttgcgtcgggttgagagggaactgcgcaattcagtgaagcggtttctcaaattgcctgtggccactgccacacccttctttcatattagcacaaaagagggtggactcgagttaccacctttgctcgagaccatagcaaaacgaaaactgaagtgggaaataaggttacagaaatcaaaggattccttgattcgagccgtcgctgactctccaaaattccgtaaacaatttgacaaagctcgggcctggattggagtgccggtgattaatcgaccaagtgacatcaataggcgaatccgagagctgaataacggcaggtttgaaaggttcacgtctgagctggctgtccaatcccggtgtcatagggctctggccagcaatcccttgcgaaatgattggctgaccggacacaaccccgggctttacgcatcacaatttatagacgcattgaaacttgtcactagccaactgcccacccgcgaagcactgaatcggggaaacccccaggccgataaaaggtgtcggggctgtggattctccgtagagaatcaaaagcacgtcatcagtaattgtcccctggtccaacaagagcgtcatctgcgccataatcgtgtcgcccagctgtttgctcgttacgccaaagagaaaggatggaatattatagcagaacctcggatcaggaatcccagcggcgaaatcatgcgtccggccatcgttctgcggcgagatgataacgtagctatcgtagacatccaaatcccttatgaagacggcggtcgcgaacaattggctgaacgatatagacaaaagtgcagcaaatatcggcagttaagcacccacattcagcatgtgctgggagttaccaatcataccattggtgcgattattgttggtgcttgtggcacatggtgcgagcttaacaatcccatcttggattacataggagtcaatactacagccataaagaagaatctcagcattgaagctttgaggggcacactgaaaatattcggccaatttaagaatagggtgtttagaaatgagagagtgcatccatcacagcggccaagctccggcccaccagtaccagatatctaa

SEQ ID NO: 1789 - DNA, 3333 bp, synthetic construct
  source 1..3333: mol_type = other DNA; note = FH-MCP-MG140-3C5TrimED
atggactacaaagacgatgacgacaagtacccctatgatgtacctgattatgctgccagcaatttcacacagttcgtccttgtagacaacggcggcaccggggatgttacagtggccccgagcaatttcgcaaacggcgtagccgagtggatctcctctaatagcagaagccaggcttataaggttacatgctctgtaaggcagtcttccgcacaaaatagaaagtacacaatcaaggtcgaagtgcccaaggttgctacacagaccgttggtggagaggagttgccagtggctgggtggcgctcctacctgaatatggagttaacaatccccattttcgctaccaattcagactgtgaactcattgtcaaagctatgcaaggtcttcttaaggatggtaacccaattccaagtgcaattgctgctaattcaggcatttattctggcggcagcagcggcggctcaagcggaagtgaaacacctggaacttccgaaagcgctacgcctgaatcttctggtggatcttctggcggatcttccgcatgcgtcgactcacattctactgctgccgcttcttccggagccgcaactggccctatagtcataagataccctgtaaacaccactaatggcgggacgaccggagaacaagcctgcttctttgctgagtcaagcaactgcgggctggctttcgtggacaataagtcatttgtggaccatctgttgcgggcccataaggcgacacgagatcaaattcaatatatatgttctcattgtcataggcagtttgagaaaatcgaaagcgttcgatcacatcataacatttgcaagcggaaggaagctgttgccccggacttagatgctaggctgccagtggaatgcgaagtggacgggtgttcacgccgctttacgactacgtccgggatgcggctgcacgtgaagaaagcacatccaattgaatatcacgcatctatacctcaatctaaaagaaatttgtggagcgaaggggagatgcggatgctggctcgtatggagctggacaatccgggactgacaaatgcgaggatgaacgaattgctgcatagtcttcatccttccaggtcagttgatgtcatcagacatatgcgcgggagaaacactcgatatagggaaatcatggaagagctcgtgttgattggcgttccagaggatagtgatagccaagccgaaaagacagcagaaccggagccagaaggaagaatcaatgaatgccagctggaagaactggtaaagacgcattcacaaattgatgacgcgcgataccaagccagtattgaatacgtacgtagggtacttcggtctgacgatccaggtgagttcttcaatgactggcttttcagttgcttccctggcaaggaaggccggcggattcagcgtcgaaaacgtgaacggctgcccccacgcaatgcaaaacagaagcgggccgcagaatttcgggtgctgcaggagctgtggcggaaagatcgttcaagacttgcaaccgtcatccttgataagatgccacctacggctaaagaaccgccgattggcgatatagaaaaggtgtatactaccaggttcgaacggcccagtccagaggaccaacatgagtttacgtccaagcctattgaggagcctatggagatggtacggtttatcacagttgaggaagttcttaagaatttaaaagccatgaagtctaacaacgcccccgggttggactctaacataacaatgaagcgtcttcggtccttgccgttgccctgccttcagctcgtctttaattgttggttggccatcggaaaggctccacagagtatgaaacaatgtcggagcaagctgcttcccaaaggggccgaaggtctggatgatgtaaataattggcgtcctttgaccataggctctctcttgatccggttatatacccggatccttgctatgcgcttacagtctaaagtccagctgcatcccagacaaaaggcctttcaacctttggacggatgcggagaaaatatcgcaatagtgtcatctttgctgcaagatgcgcacgaacgcaagaaagaattaaacatcatatttctggacatcgcgaaggcttttgattgcgtgtcacatcacagcattcaacgggcactgaatagatttggcttgccacgcgcttttcgacgtgtgatcgaagatctgtatgatggtgccacaacagtgtttcaaacatcagagggcgatagcaagacccttgggattagctctggagtaaaacaaggttgtcccttgtcccccgtccttttcaatatggtcatggacgaactcatcgctgacgcaccctctacggagtggggctatgagcttcacgacgaatccgtcgggctcctggcatttgctgacgacattgccctggtgagccattctagggcaatgatgtcacacgcgcttgattatgctgcaggcttcttcgaaaagagaaacttacaactgaacgccaggaagtgtattgggcttagtatcaagaaagctccccgccgaaaggttatgcggatcgaaatggggagtatctggagtctccgcaatgggtctgacaacattcccatcaaaatgctttctcccgccgacatggctcgctatcttggagccctgttttccccgtctgggaagcaaacaattgatctcgccactatgaagggctggattacgtccatagaaaagagcagactcaaaccgcaccaaaagttggtgatgctgcgaacgtaccttcttccgagggtactccatcacctcactattggagaaccaaacgcaactaccttgcgtcgggttgagagggaactgcgcaattcagtgaagcggtttctcaaattgcctgtggccactgccacacccttctttcatattagcacaaaagagggtggactcgagttaccacctttgctcgagaccatagcaaaacgaaaactgaagtgggaaataaggttacagaaatcaaaggattccttgattcgagccgtcgctgactctccaaaattccgtaaacaatttgacaaagctcgggcctggattggagtgccggtgattaatcgaccaagtgacatcaataggcgaatccgagagctgaataacggcaggtttgaaaggttcacgtctgagctggctgtccaatcccggtgtcatagggctctggccagcaatcccttgcgaaatgattggctgaccggacacaaccccgggctttacgcatcacaatttatagacgcattgaaacttgtcactagccaactgcccacccgcgaagcactgaatcggggaaaccccgatatctaa

SEQ ID NO: 1790 - DNA, 2946 bp, synthetic construct
  source 1..2946: mol_type = other DNA; note = FH-MCP-MG140-3C4TrimED
atggactacaaagacgatgacgacaagtacccctatgatgtacctgattatgctgccagcaatttcacacagttcgtccttgtagacaacggcggcaccggggatgttacagtggccccgagcaatttcgcaaacggcgtagccgagtggatctcctctaatagcagaagccaggcttataaggttacatgctctgtaaggcagtcttccgcacaaaatagaaagtacacaatcaaggtcgaagtgcccaaggttgctacacagaccgttggtggagaggagttgccagtggctgggtggcgctcctacctgaatatggagttaacaatccccattttcgctaccaattcagactgtgaactcattgtcaaagctatgcaaggtcttcttaaggatggtaacccaattccaagtgcaattgctgctaattcaggcatttattctggcggcagcagcggcggctcaagcggaagtgaaacacctggaacttccgaaagcgctacgcctgaatcttctggtggatcttctggcggatcttccgcatgcgtcgactcacattctactgctgccgcttcttccggagccgcaactggccctatagtcataagataccctgtaaacaccactaatggcgggacgaccggagaacaagcctgcttctttgctgagtcaagcaactgcgggctggctttcgtggacaataagtcatttgtggaccatctgttgcgggcccataaggcgacacgagatcaaattcaatatatatgttctcattgtcataggcagtttgagaaaatcgaaagcgttcgatcacatcataacatttgcaagcggaaggaagctgttgccccggacttagatgctaggctgccagtggaatgcgaagtggacgggtgttcacgccgctttacgactacgtccgggatgcggctgcacgtgaagaaagcacatccaattgaatatcacgcatctatacctcaatctaaaagaaatttgtggagcgaaggggagatgcggatgctggctcgtatggagctggacaatccgggactgacaaatgcgaggatgaacgaattgctgcatagtcttcatccttccaggtcagttgatgtcatcagacatatgcgcgggagaaacactcgatatagggaaatcatggaagagctcgtgttgattggcgttccagaggatagtgatagccaagccgaaaagacagcagaaccggagccagaaggaagaatcaatgaatgccagctggaagaactggtaaagacgcattcacaaattgatgacgcgcgataccaagccagtattgaatacgtacgtagggtacttcggtctgacgatccaggtgagttcttcaatgactggcttttcagttgcttccctggcaaggaaggccggcggattcagcgtcgaaaacgtgaacggctgcccccacgcaatgcaaaacagaagcgggccgcagaatttcgggtgctgcaggagctgtggcggaaagatcgttcaagacttgcaaccgtcatccttgataagatgccacctacggctaaagaaccgccgattggcgatatagaaaaggtgtatactaccaggttcgaacggcccagtccagaggaccaacatgagtttacgtccaagcctattgaggagcctatggagatggtacggtttatcacagttgaggaagttcttaagaatttaaaagccatgaagtctaacaacgcccccgggttggactctaacataacaatgaagcgtcttcggtccttgccgttgccctgccttcagctcgtctttaattgttggttggccatcggaaaggctccacagagtatgaaacaatgtcggagcaagctgcttcccaaaggggccgaaggtctggatgatgtaaataattggcgtcctttgaccataggctctctcttgatccggttatatacccggatccttgctatgcgcttacagtctaaagtccagctgcatcccagacaaaaggcctttcaacctttggacggatgcggagaaaatatcgcaatagtgtcatctttgctgcaagatgcgcacgaacgcaagaaagaattaaacatcatatttctggacatcgcgaaggcttttgattgcgtgtcacatcacagcattcaacgggcactgaatagatttggcttgccacgcgcttttcgacgtgtgatcgaagatctgtatgatggtgccacaacagtgtttcaaacatcagagggcgatagcaagacccttgggattagctctggagtaaaacaaggttgtcccttgtcccccgtccttttcaatatggtcatggacgaactcatcgctgacgcaccctctacggagtggggctatgagcttcacgacgaatccgtcgggctcctggcatttgctgacgacattgccctggtgagccattctagggcaatgatgtcacacgcgcttgattatgctgcaggcttcttcgaaaagagaaacttacaactgaacgccaggaagtgtattgggcttagtatcaagaaagctccccgccgaaaggttatgcggatcgaaatggggagtatctggagtctccgcaatgggtctgacaacattcccatcaaaatgctttctcccgccgacatggctcgctatcttggagccctgttttccccgtctgggaagcaaacaattgatctcgccactatgaagggctggattacgtccatagaaaagagcagactcaaaccgcaccaaaagttggtgatgctgcgaacgtaccttcttccgagggtactccatcacctcactattggagaaccaaacgcaactaccttgcgtcgggttgagagggaactgcgcaattcagtgaagcggtttctcaaattgcctgtggccactgccacacccttctttcatattagcacaaaagagggtggactcgagttaccagatatctaa

SEQ ID NO: 1791 - DNA, 3918 bp, synthetic construct
  source 1..3918: mol_type = other DNA; note = FH-MCP-MG140-3EndoDead
atggactacaaagacgatgacgacaagtacccctatgatgtacctgattatgctgccagcaatttcacacagttcgtccttgtagacaacggcggcaccggggatgttacagtggccccgagcaatttcgcaaacggcgtagccgagtggatctcctctaatagcagaagccaggcttataaggttacatgctctgtaaggcagtcttccgcacaaaatagaaagtacacaatcaaggtcgaagtgcccaaggttgctacacagaccgttggtggagaggagttgccagtggctgggtggcgctcctacctgaatatggagttaacaatccccattttcgctaccaattcagactgtgaactcattgtcaaagctatgcaaggtcttcttaaggatggtaacccaattccaagtgcaattgctgctaattcaggcatttattctggcggcagcagcggcggctcaagcggaagtgaaacacctggaacttccgaaagcgctacgcctgaatcttctggtggatcttctggcggatcttccgcatgcgtcgactcacattctactgctgccgcttcttccggagccgcaactggccctatagtcataagataccctgtaaacaccactaatggcgggacgaccggagaacaagcctgcttctttgctgagtcaagcaactgcgggctggctttcgtggacaataagtcatttgtggaccatctgttgcgggcccataaggcgacacgagatcaaattcaatatatatgttctcattgtcataggcagtttgagaaaatcgaaagcgttcgatcacatcataacatttgcaagcggaaggaagctgttgccccggacttagatgctaggctgccagtggaatgcgaagtggacgggtgttcacgccgctttacgactacgtccgggatgcggctgcacgtgaagaaagcacatccaattgaatatcacgcatctatacctcaatctaaaagaaatttgtggagcgaaggggagatgcggatgctggctcgtatggagctggacaatccgggactgacaaatgcgaggatgaacgaattgctgcatagtcttcatccttccaggtcagttgatgtcatcagacatatgcgcgggagaaacactcgatatagggaaatcatggaagagctcgtgttgattggcgttccagaggatagtgatagccaagccgaaaagacagcagaaccggagccagaaggaagaatcaatgaatgccagctggaagaactggtaaagacgcattcacaaattgatgacgcgcgataccaagccagtattgaatacgtacgtagggtacttcggtctgacgatccaggtgagttcttcaatgactggcttttcagttgcttccctggcaaggaaggccggcggattcagcgtcgaaaacgtgaacggctgcccccacgcaatgcaaaacagaagcgggccgcagaatttcgggtgctgcaggagctgtggcggaaagatcgttcaagacttgcaaccgtcatccttgataagatgccacctacggctaaagaaccgccgattggcgatatagaaaaggtgtatactaccaggttcgaacggcccagtccagaggaccaacatgagtttacgtccaagcctattgaggagcctatggagatggtacggtttatcacagttgaggaagttcttaagaatttaaaagccatgaagtctaacaacgcccccgggttggactctaacataacaatgaagcgtcttcggtccttgccgttgccctgccttcagctcgtctttaattgttggttggccatcggaaaggctccacagagtatgaaacaatgtcggagcaagctgcttcccaaaggggccgaaggtctggatgatgtaaataattggcgtcctttgaccataggctctctcttgatccggttatatacccggatccttgctatgcgcttacagtctaaagtccagctgcatcccagacaaaaggcctttcaacctttggacggatgcggagaaaatatcgcaatagtgtcatctttgctgcaagatgcgcacgaacgcaagaaagaattaaacatcatatttctggacatcgcgaaggcttttgattgcgtgtcacatcacagcattcaacgggcactgaatagatttggcttgccacgcgcttttcgacgtgtgatcgaagatctgtatgatggtgccacaacagtgtttcaaacatcagagggcgatagcaagacccttgggattagctctggagtaaaacaaggttgtcccttgtcccccgtccttttcaatatggtcatggacgaactcatcgctgacgcaccctctacggagtggggctatgagcttcacgacgaatccgtcgggctcctggcatttgctgacgacattgccctggtgagccattctagggcaatgatgtcacacgcgcttgattatgctgcaggcttcttcgaaaagagaaacttacaactgaacgccaggaagtgtattgggcttagtatcaagaaagctccccgccgaaaggttatgcggatcgaaatggggagtatctggagtctccgcaatgggtctgacaacattcccatcaaaatgctttctcccgccgacatggctcgctatcttggagccctgttttccccgtctgggaagcaaacaattgatctcgccactatgaagggctggattacgtccatagaaaagagcagactcaaaccgcaccaaaagttggtgatgctgcgaacgtaccttcttccgagggtactccatcacctcactattggagaaccaaacgcaactaccttgcgtcgggttgagagggaactgcgcaattcagtgaagcggtttctcaaattgcctgtggccactgccacacccttctttcatattagcacaaaagagggtggactcgagttaccacctttgctcgagaccatagcaaaacgaaaactgaagtgggaaataaggttacagaaatcaaaggattccttgattcgagccgtcgctgactctccaaaattccgtaaacaatttgacaaagctcgggcctggattggagtgccggtgattaatcgaccaagtgacatcaataggcgaatccgagagctgaataacggcaggtttgaaaggttcacgtctgagctggctgtccaatcccggtgtcatagggctctggccagcaatcccttgcgaaatgattggctgaccggacacaaccccgggctttacgcatcacaatttatagacgcattgaaacttgtcactagccaactgcccacccgcgaagcactgaatcggggaaacccccaggccgataaaaggtgtcggggctgtggattctccgtagagaatcaaaagcacgtcatcagtaattgtcccctggtccaacaagagcgtcatctgcgccataatcgtgtcgcccagctgtttgctcgttacgccaaagagaaaggatggaatattatagcagaacctcggatcaggaatcccagcggcgaaatcatgcgtccggccatcgttctgcggcgagatgataacgtagctatcgtagacatccaaatcccttatgaagacggcggtcgcgaacaattggctgaacgatatagacaaaagtgcagcaaatatcggcagttaagcacccacattcagcatgtgctgggagttaccaatcataccattggtgcgattattgttggtgcttgtggcacatggtgcgagcttaacaatcccatcttggattacataggagtcaatactacagccataaagaagaatctcagcattgaagctttgaggggcacactgaaaatattcggccaatttaagaatagggtgtttagaaatgagagagtgcatccatcacagcggccaagctccggcccaccagtaccagatatctaa

SEQ ID NO: 1792 - DNA, 3918 bp, synthetic construct; identical to SEQ ID NO: 1542
  source 1..3918: mol_type = other DNA; note = FH-MCP-MG140-3RTDead

SEQ ID NO: 1793 - DNA, 2997 bp, synthetic construct
  source 1..2997: mol_type = other DNA; note = FH-MCP-MG140-8N1TrimED
atggactacaaagacgatgacgacaagtacccctatgatgtacctgattatgctgccagcaatttcacacagttcgtccttgtagacaacggcggcaccggggatgttacagtggccccgagcaatttcgcaaacggcgtagccgagtggatctcctctaatagcagaagccaggcttataaggttacatgctctgtaaggcagtcttccgcacaaaatagaaagtacacaatcaaggtcgaagtgcccaaggttgctacacagaccgttggtggagaggagttgccagtggctgggtggcgctcctacctgaatatggagttaacaatccccattttcgctaccaattcagactgtgaactcattgtcaaagctatgcaaggtcttcttaaggatggtaacccaattccaagtgcaattgctgctaattcaggcatttattctggcggcagcagcggcggctcaagcggaagtgaaacacctggaacttccgaaagcgctacgcctgaatcttctggtggatcttctggcggatcttccgcatgcgtcgacaaacccacttccgcttcaaagataaacagaggtatgcgcacgcccttccggcctcaaaatcgaacgcagagaagacgtcaacattatcaacaggtccaattgctgtacaaacgcgatcggaaacaggcagctggcgtgatcttggacggatccccgctgcacgtcgtgcaaccggacgtggagaaggtagatgaaatctttagatcaagattttcccgaccttctccaccggatgacgcagagttcatttccagtcctgccggtgtcttaaatatggattatataactgcaggagagattcaacaatgtagggacagcatgaagaagaataacgcacccggtccagaccgcaacattacaatggacgtcctcttggcactggaactcccagtcctggagctgttgtttaacacgtggttagcccttaaacaggtacctgctgcatttaagacggctaggacaatactgatacccaagagcggcgatacctcagacccgaataattggcggcccattacaatatgtagcctcatctcaagactctacgccaaactgttagcctcaagattgtccaaatgtgccaacttatcagaaagacagaaggcttttcgacctgtcgatggttgcggcgagaatacagccatcctttcagccgttatcgctcaagctcgtaaaaccaagagtcaactgcatgtagtgttcttagatctggcaaaagcttttgatactattccgcatacatctattgtccgggcgctgaaaaggaaagcattgcctggccattttattgacgtggttgagaacttgtataccgaagctacaacaagtatttctgttggtgggaagaatacttccagtatgccgttgacctctggggtcaaacaaggctgtcctctgagccctatccttttcaatctggtattggatgaacttatcacattaataggtgatgacaacggagttgacttgaatgacaagaagatcgccatacttgcctttgccgatgatctcgtcctgttaagccctaccacagacggcatggagaccaacctgaaactgtgtgagggattctttgataaaagatcaatgaagttgaacgccaggaagagtgtgagcctctccattgttagggctcacaaacggaagacaatgctcactgacgaacgtcctaagtggaaagttcatggagagtttcttcctactattaaacatactgaagaaatcaagtacttgggtgtccgttattctgcagcaggaaggagcattgctaagttccctaaactcgatcaatggctccaacggctgaagaaagccccacttaaaccacagcaacgcatacaaatggtcagatctacaattacttccaggctgattcatacgctccgattatcaagagtacacgctaaactcctgaaagacttggacaggaaaatccggtccttcgtcaaatcagtcctgcaccttccatccggaacaagtactgacttcttctacattcccgtgctcaaaggcggtctggggctgcaggaatttatgactctgattccagctgcaaagctgaagctcatcaacagtatgaagaagagctctgaccaagcagttattgccgcaatggaagtcgatcattggcttagagaggagcgctggtgccgtaaggtcactttgaatcaaggaaacaagaatgatgccgaacgcaggcgccttgcaaggtatataaacagcccacgaggcaaaagtcaagtggggttcgccaatttgccaggtcagtgccgttggttagagggcggggcaaaattaacgggccacgaatatattgtgggatgccacttaatgtcaaatacgctgccagttaggactcgcacttttcatggtgggcgcgacagagtggtcacctgcagatattgtccaggggtcctggaaacaccctcacacgcactccagagctgccccgtcgtgcgtaatgccgtaactaagcgccatgacctgatcttaactaaactccaacacttcctcactcctaactatgactcagtgattcgagaaccctggtttaatgggcgggaaggtaggatgaatcccgccttggtcctcaaacagggaaagatggtttatgtggttgatctgacaattccttacgacagttctcccgagttcattgactcacaagcccagcgaaaggtggcaaaatatgataccctcaagcccttgctgcaacagaagttccaagctgaaagagtagaggttataggcctggcattaggagcgcgcggcatgtacaccagcgccggtattcagacatgcttgaaactgggtctctctgatcgtcagcgacgatatatgggaatgatggccttgcgtttaacttgcgctgtgtggggaattttccggtctcaaccttctgggttgttcaacaaagtcccggacactggtactaccgatatctaa

SEQ ID NO: 1794 - DNA, 2955 bp, synthetic construct
  source 1..2955: mol_type = other DNA; note = FH-MCP-MG140-8N2TrimED
atggactacaaagacgatgacgacaagtacccctatgatgtacctgattatgctgccagcaatttcacacagttcgtccttgtagacaacggcggcaccggggatgttacagtggccccgagcaatttcgcaaacggcgtagccgagtggatctcctctaatagcagaagccaggcttataaggttacatgctctgtaaggcagtcttccgcacaaaatagaaagtacacaatcaaggtcgaagtgcccaaggttgctacacagaccgttggtggagaggagttgccagtggctgggtggcgctcctacctgaatatggagttaacaatccccattttcgctaccaattcagactgtgaactcattgtcaaagctatgcaaggtcttcttaaggatggtaacccaattccaagtgcaattgctgctaattcaggcatttattctggcggcagcagcggcggctcaagcggaagtgaaacacctggaacttccgaaagcgctacgcctgaatcttctggtggatcttctggcggatcttccgcatgcgtcgaccccttccggcctcaaaatcgaacgcagagaagacgtcaacattatcaacaggtccaattgctgtacaaacgcgatcggaaacaggcagctggcgtgatcttggacggatccccgctgcacgtcgtgcaaccggacgtggagaaggtagatgaaatctttagatcaagattttcccgaccttctccaccggatgacgcagagttcatttccagtcctgccggtgtcttaaatatggattatataactgcaggagagattcaacaatgtagggacagcatgaagaagaataacgcacccggtccagaccgcaacattacaatggacgtcctcttggcactggaactcccagtcctggagctgttgtttaacacgtggttagcccttaaacaggtacctgctgcatttaagacggctaggacaatactgatacccaagagcggcgatacctcagacccgaataattggcggcccattacaatatgtagcctcatctcaagactctacgccaaactgttagcctcaagattgtccaaatgtgccaacttatcagaaagacagaaggcttttcgacctgtcgatggttgcggcgagaatacagccatcctttcagccgttatcgctcaagctcgtaaaaccaagagtcaactgcatgtagtgttcttagatctggcaaaagcttttgatactattccgcatacatctattgtccgggcgctgaaaaggaaagcattgcctggccattttattgacgtggttgagaacttgtataccgaagctacaacaagtatttctgttggtgggaagaatacttccagtatgccgttgacctctggggtcaaacaaggctgtcctctgagccctatccttttcaatctggtattggatgaacttatcacattaataggtgatgacaacggagttgacttgaatgacaagaagatcgccatacttgcctttgccgatgatctcgtcctgttaagccctaccacagacggcatggagaccaacctgaaactgtgtgagggattctttgataaaagatcaatgaagttgaacgccaggaagagtgtgagcctctccattgttagggctcacaaacggaagacaatgctcactgacgaacgtcctaagtggaaagttcatggagagtttcttcctactattaaacatactgaagaaatcaagtacttgggtgtccgttattctgcagcaggaaggagcattgctaagttccctaaactcgatcaatggctccaacggctgaagaaagccccacttaaaccacagcaacgcatacaaatggtcagatctacaattacttccaggctgattcatacgctccgattatcaagagtacacgctaaactcctgaaagacttggacaggaaaatccggtccttcgtcaaatcagtcctgcaccttccatccggaacaagtactgacttcttctacattcccgtgctcaaaggcggtctggggctgcaggaatttatgactctgattccagctgcaaagctgaagctcatcaacagtatgaagaagagctctgaccaagcagttattgccgcaatggaagtcgatcattggcttagagaggagcgctggtgccgtaaggtcactttgaatcaaggaaacaagaatgatgccgaacgcaggcgccttgcaaggtatataaacagcccacgaggcaaaagtcaagtggggttcgccaatttgccaggtcagtgccgttggttagagggcggggcaaaattaacgggccacgaatatattgtgggatgccacttaatgtcaaatacgctgccagttaggactcgcacttttcatggtgggcgcgacagagtggtcacctgcagatattgtccaggggtcctggaaacaccctcacacgcactccagagctgccccgtcgtgcgtaatgccgtaactaagcgccatgacctgatcttaactaaactccaacacttcctcactcctaactatgactcagtgattcgagaaccctggtttaatgggcgggaaggtaggatgaatcccgccttggtcctcaaacagggaaagatggtttatgtggttgatctgacaattccttacgacagttctcccgagttcattgactcacaagcccagcgaaaggtggcaaaatatgataccctcaagcccttgctgcaacagaagttccaagctgaaagagtagaggttataggcctggcattaggagcgcgcggcatgtacaccagcgccggtattcagacatgcttgaaactgggtctctctgatcgtcagcgacgatatatgggaatgatggccttgcgtttaacttgcgctgtgtggggaattttccggtctcaaccttctgggttgttcaacaaagtcccggacactggtactaccgatatctaa

SEQ ID NO: 1795 - DNA, 2943 bp, synthetic construct
  source 1..2943: mol_type = other DNA; note = FH-MCP-MG140-8N3TrimED
atggactacaaagacgatgacgacaagtacccctatgatgtacctgattatgctgccagcaatttcacacagttcgtccttgtagacaacggcggcaccggggatgttacagtggccccgagcaatttcgcaaacggcgtagccgagtggatctcctctaatagcagaagccaggcttataaggttacatgctctgtaaggcagtcttccgcacaaaatagaaagtacacaatcaaggtcgaagtgcccaaggttgctacacagaccgttggtggagaggagttgccagtggctgggtggcgctcctacctgaatatggagttaacaatccccattttcgctaccaattcagactgtgaactcattgtcaaagctatgcaaggtcttcttaaggatggtaacccaattccaagtgcaattgctgctaattcaggcatttattctggcggcagcagcggcggctcaagcggaagtgaaacacctggaacttccgaaagcgctacgcctgaatcttctggtggatcttctggcggatcttccgcatgcgtcgaccaaaatcgaacgcagagaagacgtcaacattatcaacaggtccaattgctgtacaaacgcgatcggaaacaggcagctggcgtgatcttggacggatccccgctgcacgtcgtgcaaccggacgtggagaaggtagatgaaatctttagatcaagattttcccgaccttctccaccggatgacgcagagttcatttccagtcctgccggtgtcttaaatatggattatataactgcaggagagattcaacaatgtagggacagcatgaagaagaataacgcacccggtccagaccgcaacattacaatggacgtcctcttggcactggaactcccagtcctggagctgttgtttaacacgtggttagcccttaaacaggtacctgctgcatttaagacggctaggacaatactgatacccaagagcggcgatacctcagacccgaataattggcggcccattacaatatgtagcctcatctcaagactctacgccaaactgttagcctcaagattgtccaaatgtgccaacttatcagaaagacagaaggcttttcgacctgtcgatggttgcggcgagaatacagccatcctttcagccgttatcgctcaagctcgtaaaaccaagagtcaactgcatgtagtgttcttagatctggcaaaagcttttgatactattccgcatacatctattgtccgggcgctgaaaaggaaagcattgcctggccattttattgacgtggttgagaacttgtataccgaagctacaacaagtatttctgttggtgggaagaatacttccagtatgccgttgacctctggggtcaaacaaggctgtcctctgagccctatccttttcaatctggtattggatgaacttatcacattaataggtgatgacaacggagttgacttgaatgacaagaagatcgccatacttgcctttgccgatgatctcgtcctgttaagccctaccacagacggcatggagaccaacctgaaactgtgtgagggattctttgataaaagatcaatgaagttgaacgccaggaagagtgtgagcctctccattgttagggctcacaaacggaagacaatgctcactgacgaacgtcctaagtggaaagttcatggagagtttcttcctactattaaacatactgaagaaatcaagtacttgggtgtccgttattctgcagcaggaaggagcattgctaagttccctaaactcgatcaatggctccaacggctgaagaaagccccacttaaaccacagcaacgcatacaaatggtcagatctacaattacttccaggctgattcatacgctccgattatcaagagtacacgctaaactcctgaaagacttggacaggaaaatccggtccttcgtcaaatcagtcctgcaccttccatccggaacaagtactgacttcttctacattcccgtgctcaaaggcggtctggggctgcaggaatttatgactctgattccagctgcaaagctgaagctcatcaacagtatgaagaagagctctgaccaagcagttattgccgcaatggaagtcgatcattggcttagagaggagcgctggtgccgtaaggtcactttgaatcaaggaaacaagaatgatgccgaacgcaggcgccttgcaaggtatataaacagcccacgaggcaaaagtcaagtggggttcgccaatttgccaggtcagtgccgttggttagagggcggggcaaaattaacgggccacgaatatattgtgggatgccacttaatgtcaaatacgctgccagttaggactcgcacttttcatggtgggcgcgacagagtggtcacctgcagatattgtccaggggtcctggaaacaccctcacacgcactccagagctgccccgtcgtgcgtaatgccgtaactaagcgccatgacctgatcttaactaaactccaacacttcctcactcctaactatgactcagtgattcgagaaccctggtttaatgggcgggaaggtaggatgaatcccgccttggtcctcaaacagggaaagatggtttatgtggttgatctgacaattccttacgacagttctcccgagttcattgactcacaagcccagcgaaaggtggcaaaatatgataccctcaagcccttgctgcaacagaagttccaagctgaaagagtagaggttataggcctggcattaggagcgcgcggcatgtacaccagcgccggtattcagacatgcttgaaactgggtctctctgatcgtcagcgacgatatatgggaatgatggccttgcgtttaacttgcgctgtgtggggaattttccggtctcaaccttctgggttgttcaacaaagtcccggacactggtactaccgatatctaa

SEQ ID NO: 1796 - DNA, 3165 bp, synthetic construct
  source 1..3165: mol_type = other DNA; note = FH-MCP-MG140-8C5TrimED
atggactacaaagacgatgacgacaagtacccctatgatgtacctgattatgctgccagcaatttcacacagttcgtccttgtagacaacggcggcaccggggatgttacagtggccccgagcaatttcgcaaacggcgtagccgagtggatctcctctaatagcagaagccaggcttataaggttacatgctctgtaaggcagtcttccgcacaaaatagaaagtacacaatcaaggtcgaagtgcccaaggttgctacacagaccgttggtggagaggagttgccagtggctgggtggcgctcctacctgaatatggagttaacaatccccattttcgctaccaattcagactgtgaactcattgtcaaagctatgcaaggtcttcttaaggatggtaacccaattccaagtgcaattgctgctaattcaggcatttattctggcggcagcagcggcggctcaagcggaagtgaaacacctggaacttccgaaagcgctacgcctgaatcttctggtggatcttctggcggatcttccgcatgcgtcgactacccaaccagtgccgaagtgcctcaaccctgccccgtatgtctgagctctttgatagatcctaaacagattagagatcactttcggaagaagcatcatggcgtgcttatgcactggacctgccggaagtgcggcaggttttggccaaataacaaaagtgctgcatctcactataggtattgtattaaaagtcttccgagtctcgaggggcctagcaaatcacacaagtgcatcgaatgcggcggatccttttcaaccctggcaggccttcaactccacaggaaacggaagcaccctgaagcctacaatgagtctctcccccggcccactgggaagaatcggccatggggagatgacgagctgaagcggctggcggccgtggagctcgatagcggcggtacaaagcatattaacattaaatgccaaaagcatctccctcataggacaatcgaggcaatcgcatctattcgcaagactgatcgctatcgcattatcttaagggaaatccggtctagccgatctataagccgagagacccgcgaggaagcaactacgtcaacacctgacagcagcaacgtgctggaacggttaacatcccgaatcgcagagctgaagtctggagattacagcccatccgtcgaagccattctcgcttataccgaacgctgcctcgaggatcgcaatgcaagtagtggtctgagcctgctgccttctgagatgtatatgcccaaacccacttccgcttcaaagataaacagaggtatgcgcacgcccttccggcctcaaaatcgaacgcagagaagacgtcaacattatcaacaggtccaattgctgtacaaacgcgatcggaaacaggcagctggcgtgatcttggacggatccccgctgcacgtcgtgcaaccggacgtggagaaggtagatgaaatctttagatcaagattttcccgaccttctccaccggatgacgcagagttcatttccagtcctgccggtgtcttaaatatggattatataactgcaggagagattcaacaatgtagggacagcatgaagaagaataacgcacccggtccagaccgcaacattacaatggacgtcctcttggcactggaactcccagtcctggagctgttgtttaacacgtggttagcccttaaacaggtacctgctgcatttaagacggctaggacaatactgatacccaagagcggcgatacctcagacccgaataattggcggcccattacaatatgtagcctcatctcaagactctacgccaaactgttagcctcaagattgtccaaatgtgccaacttatcagaaagacagaaggcttttcgacctgtcgatggttgcggcgagaatacagccatcctttcagccgttatcgctcaagctcgtaaaaccaagagtcaactgcatgtagtgttcttagatctggcaaaagcttttgatactattccgcatacatctattgtccgggcgctgaaaaggaaagcattgcctggccattttattgacgtggttgagaacttgtataccgaagctacaacaagtatttctgttggtgggaagaatacttccagtatgccgttgacctctggggtcaaacaaggctgtcctctgagccctatccttttcaatctggtattggatgaacttatcacattaataggtgatgacaacggagttgacttgaatgacaagaagatcgccatacttgcctttgccgatgatctcgtcctgttaagccctaccacagacggcatggagaccaacctgaaactgtgtgagggattctttgataaaagatcaatgaagttgaacgccaggaagagtgtgagcctctccattgttagggctcacaaacggaagacaatgctcactgacgaacgtcctaagtggaaagttcatggagagtttcttcctactattaaacatactgaagaaatcaagtacttgggtgtccgttattctgcagcaggaaggagcattgctaagttccctaaactcgatcaatggctccaacggctgaagaaagccccacttaaaccacagcaacgcatacaaatggtcagatctacaattacttccaggctgattcatacgctccgattatcaagagtacacgctaaactcctgaaagacttggacaggaaaatccggtccttcgtcaaatcagtcctgcaccttccatccggaacaagtactgacttcttctacattcccgtgctcaaaggcggtctggggctgcaggaatttatgactctgattccagctgcaaagctgaagctcatcaacagtatgaagaagagctctgaccaagcagttattgccgcaatggaagtcgatcattggcttagagaggagcgctggtgccgtaaggtcactttgaatcaaggaaacaagaatgatgccgaacgcaggcgccttgcaaggtatataaacagcccacgaggcaaaagtcaagtggggttcgccaatttgccaggtcagtgccgttggttagagggcggggcaaaattaacgggccacgaatatattgtgggatgccacttaatgtcaaatacgctgccagttaggactcgcacttttcatggtggggatatctaa

SEQ ID NO: 1797 - DNA, 2817 bp, synthetic construct
  source 1..2817: mol_type = other DNA; note = FH-MCP-MG140-8C4TrimED
atggactacaaagacgatgacgacaagtacccctatgatgtacctgattatgctgccagcaatttcacacagttcgtccttgtagacaacggcggcaccggggatgttacagtggccccgagcaatttcgcaaacggcgtagccgagtggatctcctctaatagcagaagccaggcttataaggttacatgctctgtaaggcagtcttccgcacaaaatagaaagtacacaatcaaggtcgaagtgcccaaggttgctacacagaccgttggtggagaggagttgccagtggctgggtggcgctcctacctgaatatggagttaacaatccccattttcgctaccaattcagactgtgaactcattgtcaaagctatgcaaggtcttcttaaggatggtaacccaattccaagtgcaattgctgctaattcaggcatttattctggcggcagcagcggcggctcaagcggaagtgaaacacctggaacttccgaaagcgctacgcctgaatcttctggtggatcttctggcggatcttccgcatgcgtcgactacccaaccagtgccgaagtgcctcaaccctgccccgtatgtctgagctctttgatagatcctaaacagattagagatcactttcggaagaagcatcatggcgtgcttatgcactggacctgccggaagtgcggcaggttttggccaaataacaaaagtgctgcatctcactataggtattgtattaaaagtcttccgagtctcgaggggcctagcaaatcacacaagtgcatcgaatgcggcggatccttttcaaccctggcaggccttcaactccacaggaaacggaagcaccctgaagcctacaatgagtctctcccccggcccactgggaagaatcggccatggggagatgacgagctgaagcggctggcggccgtggagctcgatagcggcggtacaaagcatattaacattaaatgccaaaagcatctccctcataggacaatcgaggcaatcgcatctattcgcaagactgatcgctatcgcattatcttaagggaaatccggtctagccgatctataagccgagagacccgcgaggaagcaactacgtcaacacctgacagcagcaacgtgctggaacggttaacatcccgaatcgcagagctgaagtctggagattacagcccatccgtcgaagccattctcgcttataccgaacgctgcctcgaggatcgcaatgcaagtagtggtctgagcctgctgccttctgagatgtatatgcccaaacccacttccgcttcaaagataaacagaggtatgcgcacgcccttccggcctcaaaatcgaacgcagagaagacgtcaacattatcaacaggtccaattgctgtacaaacgcgatcggaaacaggcagctggcgtgatcttggacggatccccgctgcacgtcgtgcaaccggacgtggagaaggtagatgaaatctttagatcaagattttcccgaccttctccaccggatgacgcagagttcatttccagtcctgccggtgtcttaaatatggattatataactgcaggagagattcaacaatgtagggacagcatgaagaagaataacgcacccggtccagaccgcaacattacaatggacgtcctcttggcactggaactcccagtcctggagctgttgtttaacacgtggttagcccttaaacaggtacctgctgcatttaagacggctaggacaatactgatacccaagagcggcgatacctcagacccgaataattggcggcccattacaatatgtagcctcatctcaagactctacgccaaactgttagcctcaagattgtccaaatgtgccaacttatcagaaagacagaaggcttttcgacctgtcgatggttgcggcgagaatacagccatcctttcagccgttatcgctcaagctcgtaaaaccaagagtcaactgcatgtagtgttcttagatctggcaaaagcttttgatactattccgcatacatctattgtccgggcgctgaaaaggaaagcattgcctggccattttattgacgtggttgagaacttgtataccgaagctacaacaagtatttctgttggtgggaagaatacttccagtatgccgttgacctctggggtcaaacaaggctgtcctctgagccctatccttttcaatctggtattggatgaacttatcacattaataggtgatgacaacggagttgacttgaatgacaagaagatcgccatacttgcctttgccgatgatctcgtcctgttaagccctaccacagacggcatggagaccaacctgaaactgtgtgagggattctttgataaaagatcaatgaagttgaacgccaggaagagtgtgagcctctccattgttagggctcacaaacggaagacaatgctcactgacgaacgtcctaagtggaaagttcatggagagtttcttcctactattaaacatactgaagaaatcaagtacttgggtgtccgttattctgcagcaggaaggagcattgctaagttccctaaactcgatcaatggctccaacggctgaagaaagccccacttaaaccacagcaacgcatacaaatggtcagatctacaattacttccaggctgattcatacgctccgattatcaagagtacacgctaaactcctgaaagacttggacaggaaaatccggtccttcgtcaaatcagtcctgcaccttccatccggaacaagtactgacttcttctacattcccgtgctcaaaggcggtctggggctgcaggatatctaa

SEQ ID NO: 1798 - DNA, 3726 bp, synthetic construct
  source 1..3726: mol_type = other DNA; note = FH-MCP-MG140-8EndoDead
atggactacaaagacgatgacgacaagtacccctatgatgtacctgattatgctgccagcaatttcacacagttcgtccttgtagacaacggcggcaccggggatgttacagtggccccgagcaatttcgcaaacggcgtagccgagtggatctcctctaatagcagaagccaggcttataaggttacatgctctgtaaggcagtcttccgcacaaaatagaaagtacacaatcaaggtcgaagtgcccaaggttgctacacagaccgttggtggagaggagttgccagtggctgggtggcgctcctacctgaatatggagttaacaatccccattttcgctaccaattcagactgtgaactcattgtcaaagctatgcaaggtcttcttaaggatggtaacccaattccaagtgcaattgctgctaattcaggcatttattctggcggcagcagcggcggctcaagcggaagtgaaacacctggaacttccgaaagcgctacgcctgaatcttctggtggatcttctggcggatcttccgcatgcgtcgactacccaaccagtgccgaagtgcctcaaccctgccccgtatgtctgagctctttgatagatcctaaacagattagagatcactttcggaagaagcatcatggcgtgcttatgcactggacctgccggaagtgcggcaggttttggccaaataacaaaagtgctgcatctcactataggtattgtattaaaagtcttccgagtctcgaggggcctagcaaatcacacaagtgcatcgaatgcggcggatccttttcaaccctggcaggccttcaactccacaggaaacggaagcaccctgaagcctacaatgagtctctcccccggcccactgggaagaatcggccatggggagatgacgagctgaagcggctggcggccgtggagctcgatagcggcggtacaaagcatattaacattaaatgccaaaagcatctccctcataggacaatcgaggcaatcgcatctattcgcaagactgatcgctatcgcattatcttaagggaaatccggtctagccgatctataagccgagagacccgcgaggaagcaactacgtcaacacctgacagcagcaacgtgctggaacggttaacatcccgaatcgcagagctgaagtctggagattacagcccatccgtcgaagccattctcgcttataccgaacgctgcctcgaggatcgcaatgcaagtagtggtctgagcctgctgccttctgagatgtatatgcccaaacccacttccgcttcaaagataaacagaggtatgcgcacgcccttccggcctcaaaatcgaacgcagagaagacgtcaacattatcaacaggtccaattgctgtacaaacgcgatcggaaacaggcagctggcgtgatcttggacggatccccgctgcacgtcgtgcaaccggacgtggagaaggtagatgaaatctttagatcaagattttcccgaccttctccaccggatgacgcagagttcatttccagtcctgccggtgtcttaaatatggattatataactgcaggagagattcaacaatgtagggacagcatgaagaagaataacgcacccggtccagaccgcaacattacaatggacgtcctcttggcactggaactcccagtcctggagctgttgtttaacacgtggttagcccttaaacaggtacctgctgcatttaagacggctaggacaatactgatacccaagagcggcgatacctcagacccgaataattggcggcccattacaatatgtagcctcatctcaagactctacgccaaactgttagcctcaagattgtccaaatgtgccaacttatcagaaagacagaaggcttttcgacctgtcgatggttgcggcgagaatacagccatcctttcagccgttatcgctcaagctcgtaaaaccaagagtcaactgcatgtagtgttcttagatctggcaaaagcttttgatactattccgcatacatctattgtccgggcgctgaaaaggaaagcattgcctggccattttattgacgtggttgagaacttgtataccgaagctacaacaagtatttctgttggtgggaagaatacttccagtatgccgttgacctctggggtcaaacaaggctgtcctctgagccctatccttttcaatctggtattggatgaacttatcacattaataggtgatgacaacggagttgacttgaatgacaagaagatcgccatacttgcctttgccgatgatctcgtcctgttaagccctaccacagacggcatggagaccaacctgaaactgtgtgagggattctttgataaaagatcaatgaagttgaacgccaggaagagtgtgagcctctccattgttagggctcacaaacggaagacaatgctcactgacgaacgtcctaagtggaaagttcatggagagtttcttcctactattaaacatactgaagaaatcaagtacttgggtgtccgttattctgcagcaggaaggagcattgctaagttccctaaactcgatcaatggctccaacggctgaagaaagccccacttaaaccacagcaacgcatacaaatggtcagatctacaattacttccaggctgattcatacgctccgattatcaagagtacacgctaaactcctgaaagacttggacaggaaaatccggtccttcgtcaaatcagtcctgcaccttccatccggaacaagtactgacttcttctacattcccgtgctcaaaggcggtctggggctgcaggaatttatgactctgattccagctgcaaagctgaagctcatcaacagtatgaagaagagctctgaccaagcagttattgccgcaatggaagtcgatcattggcttagagaggagcgctggtgccgtaaggtcactttgaatcaaggaaacaagaatgatgccgaacgcaggcgccttgcaaggtatataaacagcccacgaggcaaaagtcaagtggggttcgccaatttgccaggtcagtgccgttggttagagggcggggcaaaattaacgggccacgaatatattgtgggatgccacttaatgtcaaatacgctgccagttaggactcgcacttttcatggtgggcgcgacagagtggtcacctgcagatattgtccaggggtcctggaaacaccctcacacgcactccagagctgccccgtcgtgcgtaatgccgtaactaagcgccatgacctgatcttaactaaactccaacacttcctcactcctaactatgactcagtgattcgagaaccctggtttaatgggcgggaaggtaggatgaatcccgccttggtcctcaaacagggaaagatggtttatgtggttgatctgacaattccttacgacagttctcccgagttcattgactcacaagcccagcgaaaggtggcaaaatatgataccctcaagcccttgctgcaacagaagttccaagctgaaagagtagaggttataggcctggcattaggagcgcgcggcatgtacaccagcgccggtattcagacatgcttgaaactgggtctctctgatcgtcagcgacgatatatgggaatgatggccttgcgtttaacttgcgctgtgtggggaattttccggtctcaaccttctgggttgttcaacaaagtcccggacactggtactaccgatatctaa

SEQ ID NO: 1799 - DNA, 3726 bp, synthetic construct; identical to SEQ ID NO: 1543
  source 1..3726: mol_type = other DNA; note = FH-MCP-MG140-8RTDead

SEQ ID NO: 1800 - DNA, 2403 bp, synthetic construct
  source 1..2403: mol_type = other DNA; note = FH-MCP-140-74C5Trim
ggacctttggcaacaagggggctcttgggaatcactgtaagtggaaacatgcacagaccagactgccagagcgcaccaatggaggcgagtttccttgccctgactgcgacaacgcctacggatccagtggcggccttaacgtgcaccggagggcacgacaccccgacgtctatcacgctgcccggcagcctgctgcgcgcgtgaaagcccgatggtcttatgaagagttggtcctggtagccagagctgagttggaaattaggggtacgaatcccccgcaaggagttgtcagagttctgcacagcaggtttccggacaggactttcgaagccatcaaatgtctgaggaataaaaatcctcgatacaaggaagtgctcgctgccctcgaggtggaagaagtagacgaggggttgcccacagtgacccccagcgagcagacccacgcttttgcgcaggcagatgggctttggcgcgaccagctccgcatggccattaatatagaacacctgggagtcgatgatctggattgggtggccgacgggtgtccagccgaagatataaggaagaaactcgacgagctgtttgccagctgggttgggcacctcgtgcgcggagaaagagctcccgcccgatcccatcaacctgccgccggcgttactaacccttctcgcgaactggaccctcgccggcggcgcagggcgcagtattctgcaatccaacacctctacgggcgaaagcctagtgctgcggcccacaaggttttggatggctcttgggagtgcggcgaccccgtgcctaccccaacattggaggattttcgcatggcttggcaacctatcttcgaaactccttctatcaaagacaaccgaaggccaacatgcgtgggtcaggtacgctgggaaatagtatctcctgtgacaccaggcgagctcgaaaaggtgctcactgagggggcttctagcgctcccggacccgacggggtgaagcttaaagacgtgatagggctcggaataggagagttgtgtagccactttaacctctggctgctgtgtggatcacagccctcagcaatgtgtgtgggccgaacaatctatatccccaaaggtagtgagtccaatgacgccttgaaataccgaccaattacgatcgcatctcatattctgcgcgtcttccataagattatggcgcggcggttcgatgcttttctgcctctgaaatacacccagaagggattcagatctggcgacggaatcgcgcagcatgtactgagccttcaggctataatcgacggagctaaacggcaaagaaaacctgtcaatctggtgtttctggatgtgcgaaaagcctttgactccgtttcacacgacactattgtcctggcaatgcgaagactgggctgccccgatccctttctgagctatatccgggatctgtatagcaggtcatctacagtgatcgagcataacggagagcggagtgccccaatcttcacgcggagaggtgtcaagcaaggagacccattgagtccattcatgttcaacgccgtcatcgattgggccttctcttccctggacgaccatgttggattcagctttggtcacgtgagagtaaacaacctcgggtacgcagacgacgtggcgctgctgtccgatacccgggctggtcttcggtctcagctcggtaagtttgagtcacaccttgcaaagggcggccttaccatcagtgccgggactgaaggtaaatcttcctcactgtctatcgtggtggatgggaaggctaagagatgggtggtagaccagacaccattcctcgccacaaatgaaggcatcatccccagtctgtccgcttccggcgagtacaggtacctgggaatcatgcttgggtccggcggcgccaaagtgcgaagttccttgagagaagagctcttgcaggggctgcaaaacattacaagggcacccctgaaaccatatcagcgcatgaggattctgcggaattttttgctgccaaagtatcttcacgagctcgtgcttgcccctgtcgcagatggctggttgaattggctggataccgcaattagggctaacgtgagacagtggctgaagcttccgcaagataccccagtggctttcattcatgcgggcaccggcgacggtggattgtccgtcccatcattgagatactccgtgccggttatgagacgcaagcgactcgaagcagtgcattccgccaccgatccgttgagcactgccctcacagcctcacctttcttccaaaaggagctttctgggctctccaggaagacgctgggcggtaggctcgttacagacaagcagtccctggcacaggcatgggcaggttgcctttatactaaggtcgatggccggggcctctcagaagcaagga

SEQ ID NO: 1801 - DNA, 2952 bp, synthetic construct
  source 1..2952: mol_type = other DNA; note = FH-MCP-140-74EndoDead
ggacctttggcaacaagggggctcttgggaatcactgtaagtggaaacatgcacagaccagactgccagagcgcaccaatggaggcgagtttccttgccctgactgcgacaacgcctacggatccagtggcggccttaacgtgcaccggagggcacgacaccccgacgtctatcacgctgcccggcagcctgctgcgcgcgtgaaagcccgatggtcttatgaagagttggtcctggtagccagagctgagttggaaattaggggtacgaatcccccgcaaggagttgtcagagttctgcacagcaggtttccggacaggactttcgaagccatcaaatgtctgaggaataaaaatcctcgatacaaggaagtgctcgctgccctcgaggtggaagaagtagacgaggggttgcccacagtgacccccagcgagcagacccacgcttttgcgcaggcagatgggctttggcgcgaccagctccgcatggccattaatatagaacacctgggagtcgatgatctggattgggtggccgacgggtgtccagccgaagatataaggaagaaactcgacgagctgtttgccagctgggttgggcacctcgtgcgcggagaaagagctcccgcccgatcccatcaacctgccgccggcgttactaacccttctcgcgaactggaccctcgccggcggcgcagggcgcagtattctgcaatccaacacctctacgggcgaaagcctagtgctgcggcccacaaggttttggatggctcttgggagtgcggcgaccccgtgcctaccccaacattggaggattttcgcatggcttggcaacctatcttcgaaactccttctatcaaagacaaccgaaggccaacatgcgtgggtcaggtacgctgggaaatagtatctcctgtgacaccaggcgagctcgaaaaggtgctcactgagggggcttctagcgctcccggacccgacggggtgaagcttaaagacgtgatagggctcggaataggagagttgtgtagccactttaacctctggctgctgtgtggatcacagccctcagcaatgtgtgtgggccgaacaatctatatccccaaaggtagtgagtccaatgacgccttgaaataccgaccaattacgatcgcatctcatattctgcgcgtcttccataagattatggcgcggcggttcgatgcttttctgcctctgaaatacacccagaagggattcagatctggcgacggaatcgcgcagcatgtactgagccttcaggctataatcgacggagctaaacggcaaagaaaacctgtcaatctggtgtttctggatgtgcgaaaagcctttgactccgtttcacacgacactattgtcctggcaatgcgaagactgggctgccccgatccctttctgagctatatccgggatctgtatagcaggtcatctacagtgatcgagcataacggagagcggagtgccccaatcttcacgcggagaggtgtcaagcaaggagacccattgagtccattcatgttcaacgccgtcatcgattgggccttctcttccctggacgaccatgttggattcagctttggtcacgtgagagtaaacaacctcgggtacgcagacgacgtggcgctgctgtccgatacccgggctggtcttcggtctcagctcggtaagtttgagtcacaccttgcaaagggcggccttaccatcagtgccgggactgaaggtaaatcttcctcactgtctatcgtggtggatgggaaggctaagagatgggtggtagaccagacaccattcctcgccacaaatgaaggcatcatccccagtctgtccgcttccggcgagtacaggtacctgggaatcatgcttgggtccggcggcgccaaagtgcgaagttccttgagagaagagctcttgcaggggctgcaaaacattacaagggcacccctgaaaccatatcagcgcatgaggattctgcggaattttttgctgccaaagtatcttcacgagctcgtgcttgcccctgtcgcagatggctggttgaattggctggataccgcaattagggctaacgtgagacagtggctgaagcttccgcaagataccccagtggctttcattcatgcgggcaccggcgacggtggattgtccgtcccatcattgagatactccgtgccggttatgagacgcaagcgactcgaagcagtgcattccgccaccgatccgttgagcactgccctcacagcctcacctttcttccaaaaggagctttctgggctctccaggaagacgctgggcggtaggctcgttacagacaagcagtccctggcacaggcatgggcaggttgcctttatactaaggtcgatggccggggcctctcagaagcaaggagctgcgctgaaggatccaggtgggttagcaatccaccccggaaccagagcggagcaaactatatcggtgctattaaagcacgcggcgggttgctgtatagtaaagtgagatcagcccggggcgattctggcagagacgtccggtgcgatagttgtatgcgacccgagactgcccagcacattatccaggtctgcccccgcactagtggcccgagaatgcgccggcatgatcgcgtagtccagtttgttagcgccgctgctgagagagcggggtacaaagtgctggtggagccacggattgttgggcgcaccttgggtgtccgaaagcccgccttggtcctgtggaatgagtcccgagcctacgtggccgatgtgacaataaccagcgaccaggtcgggggcgtcaaagcccatagagacaaggttgcgtactatgatcagcctgaaattcgggagtgggttgagagatttacggggctcagtcatattagcttcagcgccgtggccgctaattggaggggcgtactgtcacccctgagcgcagacttcc

SEQ ID NO: 1802 - DNA, 2952 bp, synthetic construct
  source 1..2952: mol_type = other DNA; note = FH-MCP-140-74RTdead
ggacctttggcaacaagggggctcttgggaatcactgtaagtggaaacatgcacagaccagactgccagagcgcaccaatggaggcgagtttccttgccctgactgcgacaacgcctacggatccagtggcggccttaacgtgcaccggagggcacgacaccccgacgtctatcacgctgcccggcagcctgctgcgcgcgtgaaagcccgatggtcttatgaagagttggtcctggtagccagagctgagttggaaattaggggtacgaatcccccgcaaggagttgtcagagttctgcacagcaggtttccggacaggactttcgaagccatcaaatgtctgaggaataaaaatcctcgatacaaggaagtgctcgctgccctcgaggtggaagaagtagacgaggggttgcccacagtgacccccagcgagcagacccacgcttttgcgcaggcagatgggctttggcgcgaccagctccgcatggccattaatatagaacacctgggagtcgatgatctggattgggtggccgacgggtgtccagccgaagatataaggaagaaactcgacgagctgtttgccagctgggttgggcacctcgtgcgcggagaaagagctcccgcccgatcccatcaacctgccgccggcgttactaacccttctcgcgaactggaccctcgccggcggcgcagggcgcagtattctgcaatccaacacctctacgggcgaaagcctagtgctgcggcccacaaggttttggatggctcttgggagtgcggcgaccccgtgcctaccccaacattggaggattttcgcatggcttggcaacctatcttcgaaactccttctatcaaagacaaccgaaggccaacatgcgtgggtcaggtacgctgggaaatagtatctcctgtgacaccaggcgagctcgaaaaggtgctcactgagggggcttctagcgctcccggacccgacggggtgaagcttaaagacgtgatagggctcggaataggagagttgtgtagccactttaacctctggctgctgtgtggatcacagccctcagcaatgtgtgtgggccgaacaatctatatccccaaaggtagtgagtccaatgacgccttgaaataccgaccaattacgatcgcatctcatattctgcgcgtcttccataagattatggcgcggcggttcgatgcttttctgcctctgaaatacacccagaagggattcagatctggcgacggaatcgcgcagcatgtactgagccttcaggctataatcgacggagctaaacggcaaagaaaacctgtcaatctggtgtttctggatgtgcgaaaagcctttgactccgtttcacacgacactattgtcctggcaatgcgaagactgggctgccccgatccctttctgagctatatccgggatctgtatagcaggtcatctacagtgatcgagcataacggagagcggagtgccccaatcttcacgcggagaggtgtcaagcaaggagacccattgagtccattcatgttcaacgccgtcatcgattgggccttctcttccctggacgaccatgttggattcagctttggtcacgtgagagtaaacaacctcgggtacgcatacgacgtggcgctgctgtccgatacccgggctggtcttcggtctcagctcggtaagtttgagtcacaccttgcaaagggcggccttaccatcagtgccgggactgaaggtaaatcttcctcactgtctatcgtggtggatgggaaggctaagagatgggtggtagaccagacaccattcctcgccacaaatgaaggcatcatccccagtctgtccgcttccggcgagtacaggtacctgggaatcatgcttgggtccggcggcgccaaagtgcgaagttccttgagagaagagctcttgcaggggctgcaaaacattacaagggcacccctgaaaccatatcagcgcatgaggattctgcggaattttttgctgccaaagtatcttcacgagctcgtgcttgcccctgtcgcagatggctggttgaattggctggataccgcaattagggctaacgtgagacagtggctgaagcttccgcaagataccccagtggctttcattcatgcgggcaccggcgacggtggattgtccgtcccatcattgagatactccgtgccggttatgagacgcaagcgactcgaagcagtgcattccgccaccgatccgttgagcactgccctcacagcctcacctttcttccaaaaggagctttctgggctctccaggaagacgctgggcggtaggctcgttacagacaagcagtccctggcacaggcatgggcaggttgcctttatactaaggtcgatggccggggcctctcagaagcaaggagctgcgctgaaggatccaggtgggttagcaatccaccccggaaccagagcggagcaaactatatcggtgctattaaagcacgcggcgggttgctgtatagtaaagtgagatcagcccggggcgattctggcagagacgtccggtgcgatagttgtatgcgacccgagactgcccagcacattatccaggtctgcccccgcactagtggcccgagaatgcgccggcatgatcgcgtagtccagtttgttagcgccgctgctgagagagcggggtacaaagtgctggtggagccacggattgttgggcgcaccttgggtgtccgaaagcccgatttggtcctgtggaatgagtcccgagcctacgtggccgatgtgacaataaccagcgaccaggtcgggggcgtcaaagcccatagagacaaggttgcgtactatgatcagcctgaaattcgggagtgggttgagagatttacggggctcagtcatattagcttcagcgccgtggccgctaattggaggggcgtactgtcacccctgagcgcagacttcc

SEQ ID NO: 1803 - DNA, 2952 bp, synthetic construct
  source 1..2952: mol_type = other DNA; note = FH-MCP-140-74RTDeadEndoDead
ggacctttggcaacaagggggctcttgggaatcactgtaagtggaaacatgcacagaccagactgccagagcgcaccaatggaggcgagtttccttgccctgactgcgacaacgcctacggatccagtggcggccttaacgtgcaccggagggcacgacaccccgacgtctatcacgctgcccggcagcctgctgcgcgcgtgaaagcccgatggtcttatgaagagttggtcctggtagccagagctgagttggaaattaggggtacgaatcccccgcaaggagttgtcagagttctgcacagcaggtttccggacaggactttcgaagccatcaaatgtctgaggaataaaaatcctcgatacaaggaagtgctcgctgccctcgaggtggaagaagtagacgaggggttgcccacagtgacccccagcgagcagacccacgcttttgcgcaggcagatgggctttggcgcgaccagctccgcatggccattaatatagaacacctgggagtcgatgatctggattgggtggccgacgggtgtccagccgaagatataaggaagaaactcgacgagctgtttgccagctgggttgggcacctcgtgcgcggagaaagagctcccgcccgatcccatcaacctgccgccggcgttactaacccttctcgcgaactggaccctcgccggcggcgcagggcgcagtattctgcaatccaacacctctacgggcgaaagcctagtgctgcggcccacaaggttttggatggctcttgggagtgcggcgaccccgtgcctaccccaacattggaggattttcgcatggcttggcaacctatcttcgaaactccttctatcaaagacaaccgaaggccaacatgcgtgggtcaggtacgctgggaaatagtatctcctgtgacaccaggcgagctcgaaaaggtgctcactgagggggcttctagcgctcccggacccgacggggtgaagcttaaagacgtgatagggctcggaataggagagttgtgtagccactttaacctctggctgctgtgtggatcacagccctcagcaatgtgtgtgggccgaacaatctatatccccaaaggtagtgagtccaatgacgccttgaaataccgaccaattacgatcgcatctcatattctgcgcgtcttccataagattatggcgcggcggttcgatgcttttctgcctctgaaatacacccagaagggattcagatctggcgacggaatcgcgcagcatgtactgagccttcaggctataatcgacggagctaaacggcaaagaaaacctgtcaatctggtgtttctggatgtgcgaaaagcctttgactccgtttcacacgacactattgtcctggcaatgcgaagactgggctgccccgatccctttctgagctatatccgggatctgtatagcaggtcatctacagtgatcgagcataacggagagcggagtgccccaatcttcacgcggagaggtgtcaagcaaggagacccattgagtccattcatgttcaacgccgtcatcgattgggccttctcttccctggacgaccatgttggattcagctttggtcacgtgagagtaaacaacctcgggtacgcatacgacgtggcgctgctgtccgatacccgggctggtcttcggtctcagctcggtaagtttgagtcacaccttgcaaagggcggccttaccatcagtgccgggactgaaggtaaatcttcctcactgtctatcgtggtggatgggaaggctaagagatgggtggtagaccagacaccattcctcgccacaaatgaaggcatcatccccagtctgtccgcttccggcgagtacaggtacctgggaatcatgcttgggtccggcggcgccaaagtgcgaagttccttgagagaagagctcttgcaggggctgcaaaacattacaagggcacccctgaaaccatatcagcgcatgaggattctgcggaattttttgctgccaaagtatcttcacgagctcgtgcttgcccctgtcgcagatggctggttgaattggctggataccgcaattagggctaacgtgagacagtggctgaagcttccgcaagataccccagtggctttcattcatgcgggcaccggcgacggtggattgtccgtcccatcattgagatactccgtgccggttatgagacgcaagcgactcgaagcagtgcattccgccaccgatccgttgagcactgccctcacagcctcacctttcttccaaaaggagctttctgggctctccaggaagacgctgggcggtaggctcgttacagacaagcagtccctggcacaggcatgggcaggttgcctttatactaaggtcgatggccggggcctctcagaagcaaggagctgcgctgaaggatccaggtgggttagcaatccaccccggaaccagagcggagcaaactatatcggtgctattaaagcacgcggcgggttgctgtatagtaaagtgagatcagcccggggcgattctggcagagacgtccggtgcgatagttgtatgcgacccgagactgcccagcacattatccaggtctgcccccgcactagtggcccgagaatgcgccggcatgatcgcgtagtccagtttgttagcgccgctgctgagagagcggggtacaaagtgctggtggagccacggattgttgggcgcaccttgggtgtccgaaagcccgccttggtcctgtggaatgagtcccgagcctacgtggccgatgtgacaataaccagcgaccaggtcgggggcgtcaaagcccatagagacaaggttgcgtactatgatcagcctgaaattcgggagtgggttgagagatttacggggctcagtcatattagcttcagcgccgtggccgctaattggaggggcgtactgtcacccctgagcgcagacttcc

SEQ ID NO: 1804 - DNA, 3003 bp, synthetic construct
  source 1..3003: mol_type = other DNA; note = FH-MCP-140-88C5Trim
aggatgctgggagcaagacaagctcatgccagcgagatgcaccccctgccaatgcccagttcgtttgtgttagttgcaacagcaggtttgaccgcaagtcatctctgagtttgcattccaaaagctgcggtaacacccgaaccaagtgtaactattgcaccgtctcacttacaacatataaattgatcaggcagcatgaacgacggcaccataatgcagaatacatgagagacctggaagctgagaaacccacaccagactccgcatacttcgccaaactcgcagccatggaagcggcagcaaagggcggggttgtgtccattgctgcgatggttactgctaccggcttgaccacccaccagatcagaactaaaaggtcaaaacccgtgtatcagaaatacctcgagatggccaaacgcgatcaggtggccaagagtaagcttcttttcggggccacatccagcgcaacgagcccatctacaagcacttccgtcaccaacgccacgactactgcctccccaccaagccgggccgtgaccgtgtctcggcaacacagcgccgacggcacagccccacggaaaaacgcatcttcatcatatacgcggggtccatgtccaaaggcttcaactagcgcatctccccctggcccacccccaccttccgtcgctcggattgaaacccagacagacgacggcaagaggaggcgactcagctcaccgaccgtgcctgctggcgttcccaccagtgagcgaaagaagaagagactgcaaggatccccactgcggcctaccacgagtaggttgcttcccaatacaacaagcgcctctgccactgggctcccagctgacactccacaggaaaacgcatccccaggccctgacccgcctcccgccgctcccaataaacccgctgacagaccgccagctcctctgggggacgaatccgcgctccagcaacccgaggctccaattaccagttgtaagagactccgatccccttccctgtctccagcgatgcccctcgcccctgcccttaggaggacgtctgcgacagtgacgcctttgcgaacccgcttgccccatgctcctccaccccgactgaatagagactctgccatggccagcgagtttaggctggccctggaggcagtcctggaggcggaagagccatgtcctgggatccacagacttgttacaagcgccctgagcgataataattcaatgtttcaggctcgcctggacgagttttgggccgccacatggcccactaccacgagtcgagagcgaagacgcccacctcgcccgtcaggatacggcagcgtccaccatggaaagggaacaagggctgcagagtacaagaaggcccaggagttgtttggtaaggataaaagaggactcgctaatacgattcttgagggaaggcctattctcacaccgcccgaagtcccaagtattcagcaggttgaggatgtctttgccgccatttgggaggccgatgtggccgacggtcccatcgcggccacatctccccacattcccgtcccctccatgcctcctatcttcgaagcagacgtccagctggcccgggagcactggatgaagtccgctcccggacctgatggtataacagtcgcgcaggtgtgccggatgaacccaagagtgttggctacagtatttaacattctcctcttgagagccgctgttcccagtagctggcgcgtgttgcgcacggtattgatacataagggcggcagccgcactgaccctaacaattggaggccactgacaatcgcgagtaccttgcagagattgttccatcgagtcctgctccgccatctgacctcacacaccactctgcatccttcccaacgggggttccggtcagtggacggcacctttgctaacgctgtaatcctggatgcctatattaagtctaggaccggtcaggggaaagcctggaacatcgtggggatagacctcagtaaggctttcgattcagtgagccataatgctatttctaaggctctcgccctggcaggggttgacgaacgcctcgcaacttacataattactagtcttacaggttgcgctacccagctggacttgggtggaaagaaaagcaggcctataaacatccagagaggcgtgaaacaaggggacccactgagtcccttgctcttcaatttggtcctcgatcccatcctgcagcacatatcaacttgctttaagggcggaacgatcccaggtggggacaaggttcctgtcatcgccttcgccgatgaccttttcctgcttgccgacgacgaccttgagattcccctgatgcttcacatgctggaggagtatctgacacaacagggcctgagaatcaatgctcgcaaatgtgtgtcaatttctgctgctactatcgccggaaagtctgtagtgaggtccaaatctcactacaggatttctgagtccttgatcccttgtgtgggcaacatgaatagtttcaaatacatggggcaccagttctccgaaaaaggcatgatgccatacaatcttggcaacctgaggacttggctggaacgggttttgaaagcccctctgaagcctcaccaaaagatgtgtttgcttaaggatcacgttatccctaaggtcctgcacggcctgtccagccccgccaccactggagataagctccgcgaggcagataggctcatcaggcgatttgtgaagcgcgcactccacctgcaaatccacactgcaaatcatctgatacatgcacgaatcagggatggcggcctgggtgtgctggagctccggaagactattccggaggtaagcctgcgacgctgccgcggaatcgctaacgcgacctctgaccccgtgctcgcaagctttacatcttccgatcacttccttaaactcgtgaataagctggaaaaactggcgggcacagtaccatctaccgaagcgaatcggtccctgatcattacctctccctcttcaagcggattggagg

SEQ ID NO: 1805 - DNA, 3585 bp, synthetic construct
  source 1..3585: mol_type = other DNA; note = FH-MCP-140-88EndoDead
aggatgctgggagcaagacaagctcatgccagcgagatgcaccccctgccaatgcccagttcgtttgtgttagttgcaacagcaggtttgaccgcaagtcatctctgagtttgcattccaaaagctgcggtaacacccgaaccaagtgtaactattgcaccgtctcacttacaacatataaattgatcaggcagcatgaacgacggcaccataatgcagaatacatgagagacctggaagctgagaaacccacaccagactccgcatacttcgccaaactcgcagccatggaagcggcagcaaagggcggggttgtgtccattgctgcgatggttactgctaccggcttgaccacccaccagatcagaactaaaaggtcaaaacccgtgtatcagaaatacctcgagatggccaaacgcgatcaggtggccaagagtaagcttcttttcggggccacatccagcgcaacgagcccatctacaagcacttccgtcaccaacgccacgactactgcctccccaccaagccgggccgtgaccgtgtctcggcaacacagcgccgacggcacagccccacggaaaaacgcatcttcatcatatacgcggggtccatgtccaaaggcttcaactagcgcatctccccctggcccacccccaccttccgtcgctcggattgaaacccagacagacgacggcaagaggaggcgactcagctcaccgaccgtgcctgctggcgttcccaccagtgagcgaaagaagaagagactgcaaggatccccactgcggcctaccacgagtaggttgcttcccaatacaacaagcgcctctgccactgggctcccagctgacactccacaggaaaacgcatccccaggccctgacccgcctcccgccgctcccaataaacccgctgacagaccgccagctcctctgggggacgaatccgcgctccagcaacccgaggctccaattaccagttgtaagagactccgatccccttccctgtctccagcgatgcccctcgcccctgcccttaggaggacgtctgcgacagtgacgcctttgcgaacccgcttgccccatgctcctccaccccgactgaatagagactctgccatggccagcgagtttaggctggccctggaggcagtcctggaggcggaagagccatgtcctgggatccacagacttgttacaagcgccctgagcgataataattcaatgtttcaggctcgcctggacgagttttgggccgccacatggcccactaccacgagtcgagagcgaagacgcccacctcgcccgtcaggatacggcagcgtccaccatggaaagggaacaagggctgcagagtacaagaaggcccaggagttgtttggtaaggataaaagaggactcgctaatacgattcttgagggaaggcctattctcacaccgcccgaagtcccaagtattcagcaggttgaggatgtctttgccgccatttgggaggccgatgtggccgacggtcccatcgcggccacatctccccacattcccgtcccctccatgcctcctatcttcgaagcagacgtccagctggcccgggagcactggatgaagtccgctcccggacctgatggtataacagtcgcgcaggtgtgccggatgaacccaagagtgttggctacagtatttaacattctcctcttgagagccgctgttcccagtagctggcgcgtgttgcgcacggtattgatacataagggcggcagccgcactgaccctaacaattggaggccactgacaatcgcgagtaccttgcagagattgttccatcgagtcctgctccgccatctgacctcacacaccactctgcatccttcccaacgggggttccggtcagtggacggcacctttgctaacgctgtaatcctggatgcctatattaagtctaggaccggtcaggggaaagcctggaacatcgtggggatagacctcagtaaggctttcgattcagtgagccataatgctatttctaaggctctcgccctggcaggggttgacgaacgcctcgcaacttacataattactagtcttacaggttgcgctacccagctggacttgggtggaaagaaaagcaggcctataaacatccagagaggcgtgaaacaaggggacccactgagtcccttgctcttcaatttggtcctcgatcccatcctgcagcacatatcaacttgctttaagggcggaacgatcccaggtggggacaaggttcctgtcatcgccttcgccgatgaccttttcctgcttgccgacgacgaccttgagattcccctgatgcttcacatgctggaggagtatctgacacaacagggcctgagaatcaatgctcgcaaatgtgtgtcaatttctgctgctactatcgccggaaagtctgtagtgaggtccaaatctcactacaggatttctgagtccttgatcccttgtgtgggcaacatgaatagtttcaaatacatggggcaccagttctccgaaaaaggcatgatgccatacaatcttggcaacctgaggacttggctggaacgggttttgaaagcccctctgaagcctcaccaaaagatgtgtttgcttaaggatcacgttatccctaaggtcctgcacggcctgtccagccccgccaccactggagataagctccgcgaggcagataggctcatcaggcgatttgtgaagcgcgcactccacctgcaaatccacactgcaaatcatctgatacatgcacgaatcagggatggcggcctgggtgtgctggagctccggaagactattccggaggtaagcctgcgacgctgccgcggaatcgctaacgcgacctctgaccccgtgctcgcaagctttacatcttccgatcacttccttaaactcgtgaataagctggaaaaactggcgggcacagtaccatctaccgaagcgaatcggtccctgatcattacctctccctcttcaagcggattggaggccgccgcagatgacccggcaagccggcagtggcttcaaagcttgccgcagggttggaccgggcgagatttcgtccgggccgtgcacctgaggactggcaatctgccaacaagggatcatcacagcaacccgccggagttgagaaaatgccgggatggatgcgaagaaaacgaaagtctgcgccatatcctgcaactttgtcccagagtccaagcacatcgcattagacgccacaacgaaatagcctccaaagtggccaacgcaatgagacggaagtggacagtagagtgggagccacacgtgaaacacgaggaccgcaaattgtataagcctgccatggctatccatttgccggaccagttggtgatcgtggatgtgcaggtcgcttgggagtggaaggagaactcccttgcggttgcctgggatgcaaaacgaaataaatacaccacccctcattttatggaagccgctgcaagacgatggcctggcagaagagtaaccaccttgcccgtgatcctgggggcgagaggaatatggcccagttgcaacaggaccaccgtgaatactttgaacctgtcaagtg

SEQ ID NO: 1806 - DNA, 3585 bp, synthetic construct
  source 1..3585: mol_type = other DNA; note = FH-MCP-140-88RTDeadEndoDead
aggatgctgggagcaagacaagctcatgccagcgagatgcaccccctgccaatgcccagttcgtttgtgttagttgcaacagcaggtttgaccgcaagtcatctctgagtttgcattccaaaagctgcggtaacacccgaaccaagtgtaactattgcaccgtctcacttacaacatataaattgatcaggcagcatgaacgacggcaccataatgcagaatacatgagagacctggaagctgagaaacccacaccagactccgcatacttcgccaaactcgcagccatggaagcggcagcaaagggcggggttgtgtccattgctgcgatggttactgctaccggcttgaccacccaccagatcagaactaaaaggtcaaaacccgtgtatcagaaatacctcgagatggccaaacgcgatcaggtggccaagagtaagcttcttttcggggccacatccagcgcaacgagcccatctacaagcacttccgtcaccaacgccacgactactgcctccccaccaagccgggccgtgaccgtgtctcggcaacacagcgccgacggcacagccccacggaaaaacgcatcttcatcatatacgcggggtccatgtccaaaggcttcaactagcgcatctccccctggcccacccccaccttccgtcgctcggattgaaacccagacagacgacggcaagaggaggcgactcagctcaccgaccgtgcctgctggcgttcccaccagtgagcgaaagaagaagagactgcaaggatccccactgcggcctaccacgagtaggttgcttcccaatacaacaagcgcctctgccactgggctcccagctgacactccacaggaaaacgcatccccaggccctgacccgcctcccgccgctcccaataaacccgctgacagaccgccagctcctctgggggacgaatccgcgctccagcaacccgaggctccaattaccagttgtaagagactccgatccccttccctgtctccagcgatgcccctcgcccctgcccttaggaggacgtctgcgacagtgacgcctttgcgaacccgcttgccccatgctcctccaccccgactgaatagagactctgccatggccagcgagtttaggctggccctggaggcagtcctggaggcggaagagccatgtcctgggatccacagacttgttacaagcgccctgagcgataataattcaatgtttcaggctcgcctggacgagttttgggccgccacatggcccactaccacgagtcgagagcgaagacgcccacctcgcccgtcaggatacggcagcgtccaccatggaaagggaacaagggctgcagagtacaagaaggcccaggagttgtttggtaaggataaaagaggactcgctaatacgattcttgagggaaggcctattctcacaccgcccgaagtcccaagtattcagcaggttgaggatgtctttgccgccatttgggaggccgatgtggccgacggtcccatcgcggccacatctccccacattcccgtcccctccatgcctcctatcttcgaagcagacgtccagctggcccgggagcactggatgaagtccgctcccggacctgatggtataacagtcgcgcaggtgtgccggatgaacccaagagtgttggctacagtatttaacattctcctcttgagagccgctgttcccagtagctggcgcgtgttgcgcacggtattgatacataagggcggcagccgcactgaccctaacaattggaggccactgacaatcgcgagtaccttgcagagattgttccatcgagtcctgctccgccatctgacctcacacaccactctgcatccttcccaacgggggttccggtcagtggacggcacctttgctaacgctgtaatcctggatgcctatattaagtctaggaccggtcaggggaaagcctggaacatcgtggggatagacctcagtaaggctttcgattcagtgagccataatgctatttctaaggctctcgccctggcaggggttgacgaacgcctcgcaacttacataattactagtcttacaggttgcgctacccagctggacttgggtggaaagaaaagcaggcctataaacatccagagaggcgtgaaacaaggggacccactgagtcccttgctcttcaatttggtcctcgatcccatcctgcagcacatatcaacttgctttaagggcggaacgatcccaggtggggacaaggttcctgtcatcgccttcgcctacgaccttttcctgcttgccgacgacgaccttgagattcccctgatgcttcacatgctggaggagtatctgacacaacagggcctgagaatcaatgctcgcaaatgtgtgtcaatttctgctgctactatcgccggaaagtctgtagtgaggtccaaatctcactacaggatttctgagtccttgatcccttgtgtgggcaacatgaatagtttcaaatacatggggcaccagttctccgaaaaaggcatgatgccatacaatcttggcaacctgaggacttggctggaacgggttttgaaagcccctctgaagcctcaccaaaagatgtgtttgcttaaggatcacgttatccctaaggtcctgcacggcctgtccagccccgccaccactggagataagctccgcgaggcagataggctcatcaggcgatttgtgaagcgcgcactccacctgcaaatccacactgcaaatcatctgatacatgcacgaatcagggatggcggcctgggtgtgctggagctccggaagactattccggaggtaagcctgcgacgctgccgcggaatcgctaacgcgacctctgaccccgtgctcgcaagctttacatcttccgatcacttccttaaactcgtgaataagctggaaaaactggcgggcacagtaccatctaccgaagcgaatcggtccctgatcattacctctccctcttcaagcggattggaggccgccgcagatgacccggcaagccggcagtggcttcaaagcttgccgcagggttggaccgggcgagatttcgtccgggccgtgcacctgaggactggcaatctgccaacaagggatcatcacagcaacccgccggagttgagaaaatgccgggatggatgcgaagaaaacgaaagtctgcgccatatcctgcaactttgtcccagagtccaagcacatcgcattagacgccacaacgaaatagcctccaaagtggccaacgcaatgagacggaagtggacagtagagtgggagccacacgtgaaacacgaggaccgcaaattgtataagcctgccatggctatccatttgccggaccagttggtgatcgtggatgtgcaggtcgcttgggagtggaaggagaactcccttgcggttgcctgggatgcaaaacgaaataaatacaccacccctcattttatggaagccgctgcaagacgatggcctggcagaagagtaaccaccttgcccgtgatcctgggggcgagaggaatatggcccagttgcaacaggaccaccgtgaatactttgaacctgtcaagtg

SEQ ID NO: 1807 - DNA, 3102 bp, synthetic construct
  source 1..3102: mol_type = other DNA; note = 6xHis-Sumo-PSP-NLS-MG140-8c5-NLS
atgcatcatcatcaccatcatggatcctcggactcagaagtcaatcaagaagctaagccagaggtcaagccagaagtcaagcctgagactcacatcaatttaaaggtgtccgatggatcttcagagatcttcttcaagatcaaaaagaccactcctttaagaaggctgatggaagcgttcgctaaaagacagggtaaggaaatggactccttaagattcttgtacgacggtattagaattcaagctgatcagacccctgaagatttggacatggaggataacgatattattgaggctcacagagaacagattggtggatccggctccggcggctcaggctccctggaggtcttatttcagggccctatgaagaggcctgccgccacaaagaaggccggccaggccaagaagaagaagggcggctcaggctccggtggaagctcgatgtaccccacctcggctgaagttccgcaaccatgtccagtatgtctctctagcctgattgatccaaagcagatccgagatcacttccgtaagaaacatcatggggtcctgatgcactggacatgccgcaagtgtggtagattctggccaaacaataaaagtgccgctagtcattaccgctattgtataaagagtctcccttcacttgagggtccatcaaagtcacataagtgtattgagtgcggcggcagcttcagtactctggccggactccagttacatcgcaagcgcaagcacccggaagcatacaacgagagtctgccccgccccacaggaaagaatcgcccttggggtgatgacgaacttaagcgtctcgcggcggtagaactggacagcggcggtactaaacatataaatattaaatgccaaaagcacctgcctcatcgcacaatcgaagccatagcctctattcgcaagaccgatcgataccgcattatccttcgtgagatacgtagcagccgtagtataagtcgagagactcgagaagaggcgactaccagcacgccggattcgagcaatgtactcgagcgcttaacgtctcgtattgcggaattgaaaagtggagactactctccaagtgttgaggctattctggcatacacagagagatgcttagaggatagaaatgcaagttccgggctgtctttactcccatctgaaatgtacatgccaaaaccaacttccgcatcaaagataaatcgcgggatgcgcaccccttttcgcccccaaaaccgtactcagagaagacgccaacactaccaacaagtccaactgttgtacaagcgagatcgcaaacaggctgcaggagtaatattagacgggtcccccttacatgtcgtccaaccagacgtggaaaaggtggacgaaattttccgctctcgattctcacgcccatccccgccggacgacgccgaattcatatcttcccccgcaggagttttaaacatggactacatcacggcgggtgagatccagcaatgccgtgattcaatgaagaagaacaatgctcccgggccggaccgtaacataacaatggacgtacttctggcgctggagcttccagtactggagttactcttcaatacgtggctcgcccttaaacaagtgccagcggctttcaagactgcccggacaattctcattcccaagtctggtgatacctctgacccgaacaactggcgcccgataactatctgctccttgatatctcgtctttacgcaaagctgttagcttcccggcttagtaaatgtgcaaatctgtctgagagacaaaaggcattccgccctgtagacggttgcggtgagaacaccgctatattgtctgcggtaatagcgcaggcacgcaagacgaagtcgcaattgcacgtagtgtttcttgacttggccaaggcattcgacaccattccgcacacctctattgtgcgggctctgaaacgaaaggcactgcccgggcattttatcgacgtcgtggagaacctttataccgaggcaactacttcaatctccgtcggtggtaagaacacgtcttctatgcccctcacttcgggcgtcaagcagggatgtcccttatctccgatactctttaatctcgtgctggacgaattaattactttgattggtgacgacaacggggtagacttgaatgacaagaagatagccatccttgctttcgccgacgacctggtcttactcagtcctacaacagacggtatggagactaacttgaagctctgcgaagggttctttgacaagagatccatgaagttgaacgctcgtaagagcgtgtcgctctcaatagtccgtgcacacaagcgcaaaaccatgctgacggatgagcgcccaaagtggaaggtacacggggaattcttgccaacaataaagcacacagaggagattaaatacctgggtgtgcgatattccgctgctggcagatctatcgctaagttccccaagcttgaccaatggctccaaagacttaagaaggccccgctgaagccccaacaacgcatccagatggtgcgttctacgatcacttcgcgactcatacacactttgcgattaagccgcgttcacgctaagctgctcaaggacctcgatcgtaaaatccgctcattcgtaaagtctgtgctccacctgccaagtgggacgtcgactgatttcttttatatcccggtgctcaagggtggcctcggtttgcaagaatttatgactctcataccagcagcgaagttaaaacttatcaactctatgaagaagagctctgaccaagcggtcatcgcagctatggaagtcgaccactggctgcgcgaagagagatggtgtcgcaaggttaccctgaaccaaggaaacaagaacgatgccgaacgccgccggcttgcgcgttacataaactcacctcggggtaaaagtcaggtcggcttcgcgaatcttcccggtcaatgtcgttggctcgaaggtggggcgaagctcacaggtcatgagtatattgtgggctgtcacctgatgtcaaacacccttcctgttcggacgcggacattccatggtggtcgaggaggcagcgggggatcaggtccccctaagaaaaagcggaaggtgtga

SEQ ID NO: 1808 - protein, 1033 aa, synthetic construct
  source 1..1033: note = 6xHis-Sumo-PSP-NLS-MG140-8c5-NLS
MHHHHHHGSSDSEVNQEAKPEVKPEVKPETHINLKVSDGSSEIFFKIKKTTPLRRLMEAFAKRQGKEMDSLRFLYDGIRIQADQTPEDLDMEDNDIIEAHREQIGGSGSGGSGSLEVLFQGPMKRPAATKKAGQAKKKKGGSGSGGSSMYPTSAEVPQPCPVCLSSLIDPKQIRDHFRKKHHGVLMHWTCRKCGRFWPNNKSAASHYRYCIKSLPSLEGPSKSHKCIECGGSFSTLAGLQLHRKRKHPEAYNESLPRPTGKNRPWGDDELKRLAAVELDSGGTKHINIKCQKHLPHRTIEAIASIRKTDRYRIILREIRSSRSISRETREEATTSTPDSSNVLERLTSRIAELKSGDYSPSVEAILAYTERCLEDRNASSGLSLLPSEMYMPKPTSASKINRGMRTPFRPQNRTQRRRQHYQQVQLLYKRDRKQAAGVILDGSPLHVVQPDVEKVDEIFRSRFSRPSPPDDAEFISSPAGVLNMDYITAGEIQQCRDSMKKNNAPGPDRNITMDVLLALELPVLELLFNTWLALKQVPAAFKTARTILIPKSGDTSDPNNWRPITICSLISRLYAKLLASRLSKCANLSERQKAFRPVDGCGENTAILSAVIAQARKTKSQLHVVFLDLAKAFDTIPHTSIVRALKRKALPGHFIDVVENLYTEATTSISVGGKNTSSMPLTSGVKQGCPLSPILFNLVLDELITLIGDDNGVDLNDKKIAILAFADDLVLLSPTTDGMETNLKLCEGFFDKRSMKLNARKSVSLSIVRAHKRKTMLTDERPKWKVHGEFLPTIKHTEEIKYLGVRYSAAGRSIAKFPKLDQWLQRLKKAPLKPQQRIQMVRSTITSRLIHTLRLSRVHAKLLKDLDRKIRSFVKSVLHLPSGTSTDFFYIPVLKGGLGLQEFMTLIPAAKLKLINSMKKSSDQAVIAAMEVDHWLREERWCRKVTLNQGNKNDAERRRLARYINSPRGKSQVGFANLPGQCRWLEGGAKLTGHEYIVGCHLMSNTLPVRTRTFHGGRGGSGGSGPPKKKRKV

SEQ ID NO: 1809 - DNA, 21 bp, synthetic construct
  source 1..21: mol_type = other DNA; note = Priming oligo for primer extension on 202 RNA template; KT12
gagacggtcacagcttgtctg

SEQ ID NO: 1810 - DNA, 15 bp, synthetic construct
  source 1..15: mol_type = other DNA; note = Displacement oligo for 202 RNA template with 5'AM; KT64
cgcgcggggagaggc

SEQ ID NO: 1811 - DNA, 100 bp, synthetic construct
  source 1..100: mol_type = other DNA; note = ssDNA template (100nt) with 5' FAM; oDC111
tagaagtcctcttggcgccgaaggatggcgtgaagctcctcaagatggatctggtgtggaatgctcccattgtcgaaagtgcgctgcttccgcagcagat

SEQ ID NO: 1812 - DNA, 18 bp, synthetic construct
  source 1..18: mol_type = other DNA; note = 100nt template priming oligo; oDC112
atctgctgcggaagcagc

SEQ ID NO: 1813 - DNA, 20 bp, synthetic construct
  source 1..20: mol_type = other DNA; note = displacement oligo with 3' Iowa Black Quencher; oDC094
cggcgccaagaggacttcta

SEQ ID NO: 1814 - DNA, 26 bp, synthetic construct
  source 1..26: mol_type = other DNA; note = PCR primer with 5' phos for ssDNA production; oDC088
gggagaatggtatttactctcgaaga

SEQ ID NO: 1815 - DNA, 22 bp, synthetic construct
  source 1..22: mol_type = other DNA; note = PCR primer with 5' FAM for ssDNA production; oDC093
tagaagtcctcttggcgccgaa

SEQ ID NO: 1816 - DNA, 1004 bp, synthetic construct
  source 1..1004: mol_type = other DNA; note = ssDNA template (1004nt) with 5' FAM; S4_1004
gggagaatggtatttactctcgaagactttgtcggtgattggcggcaaactgctgggtataatttggatcaggtgctggagcaaggcggcgtcagcagcctgttccaaaacttgggagtctcagtgacgccaattcagcggatcgttctttccggggagaacggattgaaaattgatatacacgtaattattccatacgagggcctctccggtgatcagatgggtcaaattgagaagatattcaaagttgtttatcccgtaaaactgttcatccagctggtgcagacttacaaccagctctttgaagagaaccccatcaatgcaagcggagtcgatgccaaggccattctgtcagcccggctgtcaaagagccgcagacttgagaatcttatcgctcagctgccgggtgaaaagaaaaatggactgttcgggaacctgattgctctttcacttgggctgactcccaatttcaagtctaatttcgacctggcagaggatgccaagctgcaactgtccaaggacacctatgatgacgatctcgacaacctcctggcccagatcggtgaccaatacgccgaccttttccttgctgctaagaatctttctgacgccatcctgctgtctgacattctccgcgtgaacactgaaatcaccaaggcccctctttcagcttcaatgattaagcggtatgatgagcaccaccaggacctgaccctgcttaaggcactcgtccggcagcagcttccggagaagtacaaggaaatcttctttgaccagtcaaagaatggatacgccggctacatcgacggaggtgcctcccaagaggaattttataagtttatcaaacctatccttgagaagatggacggcaccgaagagctcctcgtgaaactgaatcgggaggatctgctgcggaagcagcgcactttcgacaatgggagcattccccaccagatccatcttggggagcttcacgccatccttcggcgccaagaggacttcta

SEQ ID NO: 1817 - DNA, 11 bp, synthetic construct
  source 1..11: mol_type = other DNA; note = HEX probe for qPCR
tagagcggccg

SEQ ID NO: 1818 - DNA, 19 bp, synthetic construct
  source 1..19: mol_type = other DNA; note = Acceptor FW primer for qPCR
atcgaattcctgcagcccg

SEQ ID NO: 1819 - DNA, 21 bp, synthetic construct
  source 1..21: mol_type = other DNA; note = Junction RV primer for qPCR
cccattccaaagagttccggt

SEQ ID NO: 1820 - DNA, 1776 bp, synthetic construct
  source 1..1776: mol_type = other DNA; note = 6xHis-Sumo-PSP-MG153-18
atgcatcatcatcaccatcatggatcctcggactcagaagtcaatcaagaagctaagccagaggtcaagccagaagtcaagcctgagactcacatcaatttaaaggtgtccgatggatcttcagagatcttcttcaagatcaaaaagaccactcctttaagaaggctgatggaagcgttcgctaaaagacagggtaaggaaatggactccttaagattcttgtacgacggtattagaattcaagctgatcagacccctgaagatttggacatggaggataacgatattattgaggctcacagagaacagattggtggatccggctccggcggctcaggctccctggaggtcttatttcagggccctatgcgttcgcaggaggggcggagacaacaaaaagcccccgaaggggcctacctgtgggaggaaatggtcaaaccatggggtactacgggtggtccgtcaccgtcatccgcacaaggtggggccactccccgaggaggtcagggcagcgggttaatggaacaggttgtggaacgcagcaatatgctggctgccctccgccgcgttgaacgaaacggaggggccccaggcgtcgatgggatccctactgaacgcctcagagatcagatccgtgcggaatggccgcgaattcgtgaagaactgctggccggcacataccgtcctaaacccgttcggcgcgttgaaataccgaaacctggcggaggtaaacgtttacttggaatcccgacggctgtagaccgcttgattcaacaagcacttctccaggttttaacgcccatatttgatcctcaattttccgaggcctcctatggtttccggcctggacgccgggcccatgatgccgtgcgaaaggcccgtcagtatgttgaagaaggatacgaatgggctgtcgatctcgacatcgagaaatttttcgatcaggtaaatcatgacatactgatggcacgtgtagcacgcaaagtgacagataaacgtgttctgaccctgattcgtcgttatctgcaggcgggggttatggtcaatggtgtcgtcatcgaaacaggtgagggtacaccacagggtggtcctttgagcccactgttggcaaatattcttctggatgatttagataaggaattggaaaaaagaggccacaagtttgttcggtacgctgacgactgtaacatatatgtgaaatccaaacgggcaggggaaagagttatggcgagtatccgtaagtttctgcaggaaagactcaaactgaaaataaacgaacagaaatctgcggtggatagaccgtggaagctgaagttcttaggattttcgatgcataagcgcaagaccggtgaaatcctgatacgcctggccccccaagcaattgaaagagttaagggaaagatccgagaaatcaccgctcgcaataaacccgtatctatggcggaacgtatagaacgacttaacacttacttgggtgggtggattggatacttcgccctcgcagaaacgccgtcggttttcgaggagatagagggctggatgcgccgccgactgcgtatgtacctttggaaacagtggaaacgcgtgcggactcgctatagagaactgcgtgccctcgggttgtccgaatgggttgtgcaccagttcgctaatgcacgcaaaggtccttggcgcatggcccatggcccgatgaatcgtgcgctgggcaatgcctattggcagtctcaggggttaatgagtttaaccgaacggtatcagagtctgagacaagcctga

SEQ ID NO: 1821 - protein, 591 aa, synthetic construct
  source 1..591: note = 6xHis-Sumo-PSP-MG153-18
MHHHHHHGSSDSEVNQEAKPEVKPEVKPETHINLKVSDGSSEIFFKIKKTTPLRRLMEAFAKRQGKEMDSLRFLYDGIRIQADQTPEDLDMEDNDIIEAHREQIGGSGSGGSGSLEVLFQGPMRSQEGRRQQKAPEGAYLWEEMVKPWGTTGGPSPSSAQGGATPRGGQGSGLMEQVVERSNMLAALRRVERNGGAPGVDGIPTERLRDQIRAEWPRIREELLAGTYRPKPVRRVEIPKPGGGKRLLGIPTAVDRLIQQALLQVLTPIFDPQFSEASYGFRPGRRAHDAVRKARQYVEEGYEWAVDLDIEKFFDQVNHDILMARVARKVTDKRVLTLIRRYLQAGVMVNGVVIETGEGTPQGGPLSPLLANILLDDLDKELEKRGHKFVRYADDCNIYVKSKRAGERVMASIRKFLQERLKLKINEQKSAVDRPWKLKFLGFSMHKRKTGEILIRLAPQAIERVKGKIREITARNKPVSMAERIERLNTYLGGWIGYFALAETPSVFEEIEGWMRRRLRMYLWKQWKRVRTRYRELRALGLSEWVVHQFANARKGPWRMAHGPMNRALGNAYWQSQGLMSLTERYQSLRQA

SEQ ID NO: 1822 - DNA, 1776 bp, synthetic construct
  source 1..1776: mol_type = other DNA; note = 6xHis-Sumo-PSP-MG153-18_G161K mutant
atgcatcatcatcaccatcatggatcctcggactcagaagtcaatcaagaagctaagccagaggtcaagccagaagtcaagcctgagactcacatcaatttaaaggtgtccgatggatcttcagagatcttcttcaagatcaaaaagaccactcctttaagaaggctgatggaagcgttcgctaaaagacagggtaaggaaatggactccttaagattcttgtacgacggtattagaattcaagctgatcagacccctgaagatttggacatggaggataacgatattattgaggctcacagagaacagattggtggatccggctccggcggctcaggctccctggaggtcttatttcagggccctatgcgtagtcaagagggtcgtagacaacagaaagcgccagagggagcctatctgtgggaagagatggtcaaaccctggggtaccactggcgggcctagcccatcctctgctcaaggtggtgcgacaccgcgtggtggacaagggagcgggttaatggaacaggtggtagagcgcagcaatatgctggcggcgctccggcgtgtggaacgaaacggtggagcaccgggagtggacggtatccccaccgaacgtctgcgagatcaaatcagagccgagtggcctcgtattcgcgaggagttgcttgcgggcacgtatcgcccgaagcctgttcgtcgtgttgagatccctaagcctggggggggcaagcgcctcttaggcatacccacagctgtggacagattaatacagcaagcgctcctgcaagttctgacgcccattttcgacccacagttctcagaagcttcatacggcttccgacctaaacgccgtgctcatgatgcagttagaaaggcgcgccaatatgtcgaggaagggtatgagtgggctgtggatctggacattgagaaattcttcgatcaggtgaaccatgacattctcatggctcgtgtggcccgcaaggtgactgataagcgcgttcttactctgattcgtcgctacttacaggccggtgtgatggttaacggtgtagttattgaaacaggtgaaggaactcctcaaggcggcccgttaagccccttgctcgctaacatattactggacgacctcgacaaagagcttgaaaagcgtggccataagttcgtgcgctatgccgatgactgcaatatttatgttaaatcaaaacgtgcaggtgaacgtgtaatggcaagtatccgcaaatttcttcaggagcgccttaaattaaagatcaacgagcaaaagagcgcggtggaccgcccctggaagctgaaatttcttggtttctccatgcataaaagaaagaccggcgagatcctgatccgtttagcgcctcaggccattgagcgtgttaaggggaagattcgcgagattactgcgagaaacaagccggttagcatggctgagcgtatcgagcgtttgaatacttacttgggcgggtggatcggttactttgctctcgctgaaacaccgagcgttttcgaagagattgagggctggatgcgtcgcagattgcgcatgtatctctggaagcaatggaagcgtgtacgtacccgctaccgcgaattgcgtgcccttggactctctgaatgggtcgtgcatcaattcgcaaacgcccgcaagggtccctggagaatggcgcatggtcctatgaaccgggcgcttggaaatgcttactggcaaagccaaggcctcatgtccttgacagagcgttatcaatccctgcgtcaggcttga

SEQ ID NO: 1823 - protein, 591 aa, synthetic construct
  source 1..591: note = 6xHis-Sumo-PSP-MG153-18_G161K mutant
MHHHHHHGSSDSEVNQEAKPEVKPEVKPETHINLKVSDGSSEIFFKIKKTTPLRRLMEAFAKRQGKEMDSLRFLYDGIRIQADQTPEDLDMEDNDIIEAHREQIGGSGSGGSGSLEVLFQGPMRSQEGRRQQKAPEGAYLWEEMVKPWGTTGGPSPSSAQGGATPRGGQGSGLMEQVVERSNMLAALRRVERNGGAPGVDGIPTERLRDQIRAEWPRIREELLAGTYRPKPVRRVEIPKPGGGKRLLGIPTAVDRLIQQALLQVLTPIFDPQFSEASYGFRPKRRAHDAVRKARQYVEEGYEWAVDLDIEKFFDQVNHDILMARVARKVTDKRVLTLIRRYLQAGVMVNGVVIETGEGTPQGGPLSPLLANILLDDLDKELEKRGHKFVRYADDCNIYVKSKRAGERVMASIRKFLQERLKLKINEQKSAVDRPWKLKFLGFSMHKRKTGEILIRLAPQAIERVKGKIREITARNKPVSMAERIERLNTYLGGWIGYFALAETPSVFEEIEGWMRRRLRMYLWKQWKRVRTRYRELRALGLSEWVVHQFANARKGPWRMAHGPMNRALGNAYWQSQGLMSLTERYQSLRQA

SEQ ID NO: 1824 - RNA, 150 nt, synthetic construct
  source 1..150: mol_type = other RNA; note = Donor RNA template
gaccggaactctttggaatgggaataagatcattgatgaaagacttataaatcctgatgggagtctcctctttagagtgacaattaatggggtaacaggatggagactctgtgagcggatcttggcttagcccaaacccaaacccaaacc

SEQ ID NO: 1825 - RNA, 152 nt, synthetic construct
  source 1..152: mol_type = other RNA; note = Acceptor RNA template 3'-TT
cccctcgaggtcgacggtatcgataagcttgatatcgaattcctgcagcccgggggatccactagttctagagcggccgccaccgcggtggagctccagcttttgttccctttagtgagggttaatttcgagcttggcgtaatcatggtctt

SEQ ID NO: 1826 - RNA, 158 nt, synthetic construct
  source 1..158: mol_type = other RNA; note = Acceptor RNA template 3'-NN
cccctcgaggtcgacggtatcgataagcttgatatcgaattcctgcagcccgggggatccactagttctagagcggccgccaccgcggtggagctccagcttttgttccctttagtgagggttaatttcgagcttggcgtaatcatggtcttccggaa

SEQ ID NO: 1827 - RNA, 349 nt, synthetic construct
  source 1..349: mol_type = other RNA; note = Full Template
gcgaattgggtaccgggccccccctcgaggtcgacggtatcgataagcttgatatcgaattcctgcagcccgggggatccactagttctagagcggccgccaccgcggtggagctccagcttttgttccctttagtgagggttaatttcgagcttggcgtaatcatggtcatagctgtttccttcagcggatcgttcttgaccggaactctttggaatgggaataagatcattgatgaaagacttataaatcctgatgggagtctcctctttagagtgacaattaatggggtaacaggatggagactctgtgagcggatcttggcttagcccaaacccaaacccaaacc

SEQ ID NO: 1828 - RNA, 119 nt, synthetic construct
  source 1..119: mol_type = other RNA; note = polyA-3'OH
atcctgatgggagtctcctctttagagtgacaattaatgggtaacaggatagactctgtgagcggatcttggcttagcccaaacccaaacccaaaccaaaaaaaaaaaaaaaaaaaaaa

SEQ ID NO: 1829 - RNA, 119 nt, synthetic construct
  source 1..119: mol_type = other RNA; note = MS2-3'OH
atcctgatgggagtctcctctttagagtgacaattaatgggtaacaggatagactctgtgagcggatcttggcttagcccaaacccaaacccaaaccggactgaggattacccagtcta

SEQ ID NO: 1830 - DNA, 119 bp, synthetic construct
  source 1..119: mol_type = other DNA; note = polyA-3'Block
atcctgatgggagtctcctctttagagtgacaattaatgggtaacaggatagactctgtgagcggatcttggcttagcccaaacccaaacccaaaccaaaaaaaaaaaaaaaaaaaaaa

SEQ ID NO: 1831 - DNA, 119 bp, synthetic construct
  source 1..119: mol_type = other DNA; note = MS2-3'Block
atcctgatgggagtctcctctttagagtgacaattaatgggtaacaggatagactctgtgagcggatcttggcttagcccaaacccaaacccaaaccggactgaggattacccagtcta

SEQ ID NO: 1832 - RNA, 100 nt, synthetic construct
  source 1..100: mol_type = other RNA; note = RNA template (100nt) with 5' FAM; oDC110
tagaagtcctcttggcgccgaaggatggcgtgaagctcctcaagatggatctggtgtggaatgctcccattgtcgaaagtgcgctgcttccgcagcagat

SEQ ID NO: 1833 - protein, 317 aa, synthetic construct
  source 1..317: note = Retron RT
MLDYLGLPRISSLRDLSAEINLSEYTLFLMSRNTDLYYKEVAVPKKNGGTRLLACPSSEIKAIQAWILRNILEKISVSRYATAFKKDVNVLHNARIHIGNLYVLCMDIEDFFGSIKANKVYSFFIKLGYSRQAALLFTKFCTYKGCLPQGGVTSPALSNILNRDLDTKISNVCKSLNVFYTRYADDLTFSSNNLKKLREIRNNIEEILNSEGYRVNTKKTRLRWPGTRREITGLIYSDNNSEVRIGKRTKKILRAKIHHLESGLEKNEDRYYKLFYHLVGWMSYLHSVDLKTYNQLLRYWNSLNSNNAFVAVSRSFD

SEQ ID NO: 1834 - protein, 324 aa, synthetic construct
  source 1..324: note = Retron RT
MTSATPSQVFRLRNLGLPVMSSLEDMSREMRLSVDILRLYIYRADKYYKVYSLPKRDGKRSRIISQPSRELKALQAWVLRNILDKLHSSPFSKGFEKGQSILNNASPHVGANYVLNIDLEDCFNTILIEKIYTVFHSLGYNSTISNALARLCSFNGSLPQGAPSSPKIANLVLTKLDYRIHGYAGSKGIVFTRYADDLTLSAQSLKKILKAKSFVCSIIPSESLKVNYNKVAIHGPKARKEVTGLVLSIDNVGVGRIRYREIRSKIHYLAVKRNSDFEHVKGLIAFVKSVDKKNYRKLMTFSNKMSETYGVDLSVLFPKNKKAI

SEQ ID NO: 1835 - protein, 291 aa, synthetic construct
  source 1..291: note = Retron RT
MTTLENIAQRVGVNTNYLSRMKINSDKLYKAYYQRKSSGKLRRIEAPNKHLKAVQRWILRNILKDVPISDFAHGFSKGRSIKSNARYHLQKKYILVLDLKDFFPSITEGMVSRAFTEIVHDPQMSAIYTKFCTYKGRLPQGGATSPALSNIIFRSVDEKIVNICGRMNIAYSRYADDMTFSSNDLMSLRQLHNKLVPIIESDGYVLNNEKTRYLSGKGKMVVTGITLNSGRMTTGRDRKRKIRAALYNLIVRKDTTVKMNEVSGTVAFMRDIEPGYYLKLKEYIKSINNKT

SEQ ID NO: 1836 - protein, 295 aa, synthetic construct
  source 1..295: note = Retron RT
MTYSDFHLRLGIPESVLRRLVENKDKCYNTYHVPKKSGGQRQIDAPNVELKGVQLWVLRNLLESVELHPAATAFVKKRSIRHNADAHIGKKFILTLDIKDFFPSIVETTVFQVFNKIVDNDELANMLARLCTFRGYLPQGAVTSPTLSNISFRTVDDLISGRAAELGVSYTRYADDMTFSSNVRERLDELGPIVAGYLKDAGYVVNHKKTRLVSSGKALEVTGLYLNSGRPTVGRILKRKVRSLLFRYIYHGDRTVSKSTIYGYLSFIRGIEPDFEASVRAYLQKVRDKKDRRPP

SEQ ID NO: 1837 - protein, 324 aa, synthetic construct
  source 1..324: note = Retron RT
MEASPRKSRLRTFRLPEIQNLTEFSNQIRLSESAIKKYITFAEHYYFTYGIPKKTGGERLIAQPSRELKAIQSWLLRNILDKLPSSASSKGFELGTSIYNNASPHIGSNVILSFDIDNFFPSIPANKVYGVFCSCGYNKRISSAFTSICTFKGFLPQGSPASPKLANLVCLNLDSRIQGYAGKHGITYTRYADDITLSCHSIKKIEKAKTFIPTVIKDEGFKLNKQKTRLMGLRKRKSVTGLVVNLNKAGVGREVYREMRVKIHRLFIDEADNYSHINGWLSFIYGIDDEIYNKLYVYIKNLSEKYPFSDAINNLLAKPPRIIP

SEQ ID NO: 1838 - protein, 303 aa, synthetic construct
  source 1..303: note = Retron RT
VIEANQELYTQRLLALPIIQNIEDLSTRTRLPVSLISQYLGDNSRYYFNIHHKKKTGGIRSINSPNRQLKALQRWILKNILEKLKPSRYAKGFIPKLNLLDNAQPHAGNQYVLKIDLKDFFPTIEANKVYSIFRAVGYSKKISYYLTSICTLKGYLPQGAPSSPYLSNLVCLRIDHRIGRYCDKYALIYTRYADDISISGNQLSSIKKSWLIIKMIISEEGFIINKNKELLSGPRSSRTVTGLVTNPAVGIGRKKYNHYRKEIFNLKRNDSTLHIEKITGILSFVKSVDIKRYEQLKKYYETI

SEQ ID NO: 1839 - protein, 309 aa, synthetic construct
  source 1..309: note = Retron RT
MTTKIKSRGLYTQRYFALPELKTASDLAREIRLSELVLFKYFSNNSKYYHSYKIKKKSGSFRVISAPFVELKAIQRWILRNILDKLNTSPYAKGFIKGKKLIENAIPHTNKQYILNIDLKDFFDNIPASHVFSIFHALGYSPLLSYQLAKICTKNGVLPQGAPTSPSLSNLVCSRLDYRIGKYCEKNALSYTRYADDLTISGNKLDIMKTAKQTILKIIKDEGFIVNFNKLKLVGPGLKREVTGLVVNNILGIGRVKLNEYRLRIFNLYKSNDPLAKAITDGIISYVASVDKPRSDKLRILHDKLQSHS

SEQ ID NO: 1840 - protein, 291 aa, synthetic construct
  source 1..291: note = Retron RT
MKKLQDIAQEMGVNKSYLSLISRNHNKCYQSYYLGKNGRAKRVIDAPNSELKAIQRWILRNVLENQPLKPCVHGFRARHGIKTNARRHLGKPFIMCLDIKDFFPSIKRGRVFSIFHDIFNDKNTADVLSNLCTYKERLPQGGVTSPALSNIVLDKADERILGICSRKRVIYTRYADDLSFSANYVSYLEELKPEIDKILGEDGFELNEKKSRFLRGKGRMLVTGLVLNSGKLTVGRSRKREVRAALFNYIVKKDKKVNVNKLVGTLAFIRDIEPDFYEKFLEYRSRLRART

SEQ ID NO: 1841 - protein, 298 aa, synthetic construct
  source 1..298: note = Retron RT
MVQTIQDLDNLAILLGVPKFIVTKYIFQADSFYKVFRIRKRSGRGYRIISAPSSELKGIQRWISVFILRKIPLPDECMGFRIKHSICDNASPHVKKDFVLHLDIKDFFPTITTPRVIGLFKSLGYTREVAFGLGKLTTYQHKLPQGAPSSPSISNIICRKLDYRIKCFCDKRGWSYTRYCDDMTISGMGHMPSINIITKIIRDEGFEINQRKTSLMRRNTCQRVTGLVVNEGVNISKHRKKIWRAIFHQAGLTPDKFYSRRAELLGYIEFLKMVCSTEDPSIATYTDIIKKLDCIKSI

SEQ ID NO: 1842 - RNA, 184 nt, synthetic construct
  source 1..184: mol_type = other RNA; note = Retron ncRNA
agaaaatattggggagtaaagaaagccacttagagtgtttattttttcggatggtgtttcgctatccgtttgagaaacttcacattaactttttcaagaaaggagctcgctttgccccgcaaaccgatctcctttcttgaaaaacgtatttagggtaagtggatctttctcctcaatattttct

SEQ ID NO: 1843 - RNA, 176 nt, synthetic construct
  source 1..176: mol_type = other RNA; note = Retron ncRNA
aaggagggagagagacttctagcactaacgagctaagtattttatttatttgctcgcgtctgatgcttcgtcaggcctatgtaaacttgcaactacatagcccgcaattcgtctttaagctcgcgcgctcgctttaacccgaattgcgggcactaagtagaggtttttctccttcc

SEQ ID NO: 1844 - RNA, 188 nt, synthetic construct
  source 1..188: mol_type = other RNA; note = Retron ncRNA
gtgtggggggatggggccaaatcctagactaggaccaaagacgtattggtcggtcaagtgttcagcttggcagacaaaaaactcgcatttaccactcgccagcattcggcgcgcccgggtatttgcgagcaaattcccggccgcgccgaatgctggcgctcttcccggtaggatctctccccccacac

SEQ ID NO: 1845 - RNA, 199 nt, synthetic construct
  source 1..199: mol_type = other RNA; note = Retron ncRNA
gtgtgcgcactcttagcgagtggttattaactcattggagtaaataaccactgggtagtgtttcgctatcccgcaggaaatccattttcatatgacgtatcaacaatgtcgtgggatccatttaatggattttcaatccattaaaagtttcccccaacattgttaacacgtctttcttaagacgtaagagtgtgcacac

SEQ ID NO: 1846 - RNA, 247 nt, synthetic construct
  source 1..247: mol_type = other RNA; note = Retron ncRNA
tactagcccctaagcgggttgcgagcattgttgtagggccttatacgcaatgtttcgtaccagcggttagagatatgtatcctctacacccacaattaagcattgtcacgataatgcgatcgagctcccaaaactaccccgcgtagttttagtatctcgtacgcattatgggataccagggagtaaaaaccctggccagcagggtttttactccctgtcatccctcttcagccgttaggggctagta

SEQ ID NO: 1847 - RNA, 260 nt, synthetic construct
  source 1..260: mol_type = other RNA; note = Retron ncRNA
tagctggtttctaagctgagacaatgtgaatgttaataggcctaatttaacatccatgaatgtctagcggccagagaatctctgagcccacattaaatcgttcaaactcgcaggacgatcaacttcaagaaaacacccttttctttcagttgtgcgtcctgactcaagccaggaagaaggcagttaagccaactcttcctcggcggaagagttggcttaactgccttcttccaagctaatttagagttagaaaccagcta

SEQ ID NO: 1848 - RNA, 171 nt, synthetic construct
  source 1..171: mol_type = other RNA; note = Retron ncRNA
ggagagggaaagacttctagatgtaagctaactgaatattatggtgtgcttaccgcctgacgcttcgtcaggcctgtgcaaactctcttctacagcgttgcgaattaaactcgctcacttttcgctcacgagctaattcgcaacttattgagtagaagttttttcctctcc

SEQ ID NO: 1849 - RNA, 176 nt, synthetic construct
  source 1..176: mol_type = other RNA; note = Retron ncRNA
agggagcctgttatatataatctttggactgcattttttgcaggtgtggttgatgctatcgtcaaccttgacttaatggttacattcgctatcggtgccgtgggctcgcgaaatatccatttcactcgccgacggtaccttcagtattagtaagaagcaaagatagcaggctccct

SEQ ID NO: 1850 - protein, 1140 aa, unidentified
  source 1..1140: note = uncultivated organism;MG140-149 retrotransposition protein
MQTERADSPSGSVTTISQDSHNPFYLIVYPIESDCTLCDFNCGNLNLKIRQHVIDEHAINNFKYGCKLCFKNYETINGVKAHYTACKRQPIATTTTTTTTTTSTATTTTSIRSTSPPSTTDPFQCAECLKASTIKIFKDRKGLTTHMRTKHPEEYETSKMVATKRIAWSNDEDRVLAKLELSLKEVQRGQILSRLHVGYNEIAAKSKAPSRSKEAIRGRRQQPDYKALMNEMIEELDATSDNDDSSSDVSIPAHTAIPASNCNIVNPRTGIHKYLEDILKDRSKVFNSETLDAIQKYLRDEDSDEILTKTMNGINEAIEMYREKHPPKLKCGKPKVSNNKKPIRNTKRQESARMHGYYQSLFYKNEKKLVTEILDGESSNVDPPPIAVAETYYKNIWSKPSKDDAPFELKVTTNTDELFAPISKEEIDNAIRNTKQDSAPGPDLVNWFETKGIVTELSAVFNIWLGIQRIPNQLKENKTILIPKSNTDQSNIKNWRPITISSMILRTYNKILGYRMNRVFKTNDKQVGFKPVNGCGINILWLHSLLKHARKNRNNIYACLIDVSKAFDSVSHESITRALRRNGAPTALINIITDQYTNANTVITYNDAHSQKINILCGVKQGDPLSSILFNLIIDELFDVLQDDHGYSIHGIGKTNARCFADDLCLISSTRIGMGELLRKTNVFLAERGLSINPAKCITIGLAKGYKGKKSKIETESLFDINGTPIPMLGYTDKTCRYLGINFTSIGAVDSKRIKRDIVEALHKITKIKLKAQCKLKLLRTYVIPRFLYQLVNSEIQPSFLKRIDICIRKTVRSILHLPMSLSNEFFYLPMKEGGLQFPDLSQVVGIAKIRLFKKITLLGDPMLKYLIEDQGNCINEKFIVNLNIGGTHTANEITHLKDQMMKEKRASYAKKVHSTGQEIFATCPLTNQWIQGNLKTMRTRTFINSIKLRTNSLETKVTTTRGLDTNKTCRMCNMADESLMHLLQCCPATKGLRYVRHHKICARVANKLIARGYQVYKEKSFPDPNRLGCTLRPDIIAIKDNRVLILDVSAIYERTGATFINAYQNKITRYDPILNAVKNHFDCSDGQVIGLIIGSRGSYYHNHLHIWHQLGLSTMDLKFIAIGCMEDSIKIASLSSLIR

SEQ ID NO: 1851 - protein, 1175 aa, unidentified
  source 1..1175: note = uncultivated organism;MG140-152 retrotransposition protein
MKTRTNTRVNVTRSVQSESIEIDKDEPSQESARSPPVVYRIDYPIGEERCSICVDRLPSQNLKIREHLSDVHGVQEIYYKCRICTKEYPNISSMKSHYPACVRKLGQQPTTNPTVDNHPQNPTTGQQHTTTSTGPVLSMFQCSVCHHLKVNYVAKDQKGLVTHMRTKHPNEYEESKKVANIRVAWHEDEDRLLATLEISLKAKQKGQILGRLCTEWNKIAVQSHANPRSKEAIRGRRQQPEYKAMLEEVQCRSNLLLQAADRTSNDNASSKESDSESPTDPAAVEDDTCMIHNLLRDILQSDNPGVSTFMKDAITALHNPQTAIDPVQQTMIGIQHSLSIIRNRNSCRTSRNFTSNRKPARNKSRIIKEKSHAYYQKLYLNNKSRLIDELIEGVPPHTDPPPIHTAVQHYEQIWSTMGVDQHPVQKIPDQRSIGSNFLSPITRVDIEWAIKRTKRDTAKGLDQVTLQEAKLLAKEDLYIAFNIWLCCQRIPRELKLNRTTLIPKGNTDLDNIKNWRPITISSLLLRLFNKIIGFRLNKIFELDKRQMGFRPINGCSLNIQWLHNLLKHARLHRRNLYVCLIDVAKAFDSIPHESIFRALTRFRASSSIIELIRDQYTNSSTTIAYKDLSSRRIRILRGVKQGDSLSPLLFNLVIDELFDILKDQFGYSIANIGSTNIKCFADDMCLISGSKSGMGVLIKDATTFLEHRGLQVNAKKCMSIGLAKAYKGKKSKIVTEPTFNIHGVEIPMLGYVEHTTKYLGIEFTSVGSINANVAKAKIEYVLDQLQQTPLKPQQKLDLIRSYIVPRFIYQLINLEIYPKILKQIDLLIRRSVRSILHLHQCLSTEFFYLPVRDGGLQIPLLRDIVGLAKVRIYKQVMKSDDTLLKHLVEAQGFFTIQRFIHELQLSSSFETTDIVQRKTQLVRDKRVSFGNKVHGHGFEVFSTCPMTNFWLYGDCKTMTGRSFINGIKLRSNTLETKVTLSRGMDVDKTCRLCKKQDESIMHVLQFCQGTQGLRYLRHNYVCARVVNKLRERGFTVYSEKVFLADVTGLDTLRPDILAVKDNQAYLLDVQCVYETSNASFINAYNLKTEIHTSHSNSKRSVWLYIGNNPRSDRWLTRFVLSPPSRHLVQFRFYIIRTKISSLKLSREFAPNNVNISRKCEKPTEKRVGIIKGKRR

SEQ ID NO: 1852 - protein, 1230 aa, unidentified
  source 1..1230: note = uncultivated organism;MG140-154 retrotransposition protein
MERSIRKNETLPRVSRQSNARPTCTSDAKARGPQPPSRPEGDGLKCLNPGCPFVSKTVDSFARHRCKFIPVAEKEPVGTSVVGVEERPASSGKPPPAGKRASRVCPVVRRTVVSRGERKAKPVPVIEEEPLSTPTTETEEPTASSWEDLPADDEAYGCPENNCSYECASVSELSKHRETHASASQGKKETTHPNKGEADDPGKPPTKQVHNCQYCVKSFGTKGGLTIHKRKTHPDEHNRENQQRKENESTGRHSWDESKHLVMANLELSYGELVRTGTLNSSTMGVNMFLQLSEPFKVGFSINQISMQRKGKKYQDVLRDRRCELAQIARLQYETPIEDQINVEEEEPSLPEFEAEPEDSKFEGKTLDAAYAALKQGDVETASDLASKVVKHLQDLSTDTKPKPPSRSRPDKQAKIPKKTNKRALRKQQYATTQKLWHKNRASCVKKVLSGRWTQPEPQPAHTPEQLHDTWSGIFGKPSPKYTGKAPPRAKITKTVGNPFTVTECSRILKEATDSAVGPDGVKLPLIREAGPTFMAKLMNIFLFTGKVPSSLKVARTILIPKSEKPSDAGDYRPISISSHIYRVYTSALGKRLSKDAGLNQRQRGFIAEDGCRDNLILLETIIAASKESCSGLNMAFVDMKKAFDSVSHSAIAESLDWFGVPKHLADAIKDLYVDCTTSVGHGEIKVTRGVKQGDPLSSILFNMCLEMALSNIDPKMGIRFKGHHIFYLAFADDLVILSPSAMGLQSLLDDLVRHCGDVGLEPNPKKCSSLSIVPDGRNKVVFVDDRRVFHLSGAPMGIMGAKSTYKYLGIDVGFRPDKRVIPLWDKFNSKLNSLTRAPLKPQQRMLVVRQYLIPQMTHVLVFSDASKKLLNRMDVKLRLNIRKWLGLPNDTHKSMFAASPEAGGLGIPSLTQTIPLLRLRRLAKLGESGDVILREVASNKRIQQRLTVARKHCKVEGLPYCTKEELKARLSESLWASADGRGLRNEQMYKRGLSFIRDGAFMTGKAYVSAVAVRGNLLQTPARLARGRLNRPGAGMCHKCHEGSVATLGHILQSCPKTHGLMVQRHDSVVTSLVEAIRQTTRNKRVFVEPRIKRVGDTDYVKPDIIVVNESQTYLIDVQILADAGCVEDLNSKAEIKTSKYDVRPVHLGVDAFLKTHSLEVVSPTKVHAFTLDWRGKVPEHTESVARELGVLKALEWIVPDMLLANRSIYTTWNKSTSRQGRFGKKIGT

SEQ ID NO: 1853 - protein, 1314 aa, unidentified
  source 1..1314: note = uncultivated organism;MG140-155 retrotransposition protein
VRDDEVVLYLPTGADLVCRVGRCGLTFLTPVSFYDHVTRAHRQTHRCRVICSNCGRTCKSAVGHAIHWGYGCKGRAPSKSGTKAFQCSECICTFTSERARSTHIRHEHPVLCNELRRFKNGLPLTEGVDAADIVQSVPDQGFLHLDEILKNVPLASEADRGELTQEGILRMVSLEASGALGGVAKMRLTGHIATQCGLEPSKPILDGIRTLRNTRKWKRALATVREQLGKRAEETSTPNLGRECSSPDDDPGLALAQEAEWLTDLQIDPSRVVTCNSSALGVEILPPSYGDCMAKSQPGAEITTCRIDPAGQEPVAPSGTAVKPRGRNWQPCVLKPPSEYLEIRREIETPTAEEKKSSLFVEPPLTLVHTYTPALGPAERHIVRHRHRRKEREKEEGQCVYERREFYGDPMLESLADGDMGPELVDGVLDGWLRDIGNCSNTIASKDNRGDNRGGRRTAEPKRVNSKRFKAKQRKKLSKRAAARLARQRAYLLHRGLYRDNRRKLARLLLDGAEDVGCDIEVGEVEREYRRIMSIKGSSCGVKGSVENYPEPEVRAKNSGLMVQVRAEEVQRHLKQVKRGSAPGPDAVKAESLKAWAGDCSRLAALFSAWLHSGRVSPSLKKSRSILLPKTNDRQQLKSLSRWRPLTIGCHILRLFNRILASRLSEAVSIHVRQRGFLKAVNGCAENLTLLTELLDGARRADAGSQLAVLFVDFSKAFDTIKHDYLWASLRRLGVGSPFVELIQNMYDGSMTSFKTRRGTTNPISIMRGVKQGCPLSPLLFSIAVDPLITQLEQLSLGKRVPGGGTVSCLSFADDTALVSDDPDKIQTMLDCISRFGELSGLELNPLKCEGFVIQSLGGKAGSTLNQNIIWRGKGKTVPILRPDSTLRYLGGTISAWCSPRTDGQNISQCEKYAECVDRASLKPTEKVQLWRECVLPRFLYDLQFKNPTKSYLSKLDEISCKMVKRWLRLPNCATNHFLWSARRHGGLGLPKMQAAGAITRIRTLMAATLSKDPVLVALARSLDYGSLARDLSRKFNLPAPKPGKPYKRIQWVLDEHEKWASKRCQGSGAMSFKSSLSNSWNASWDQNRDSGFAPGQIIAAQLLRVNLFPCGEVLARGSGREIPRCRWCRGRDTLGHISGECPGTRARRIRRHNKILEQVCAFMVGRGWLVEREPSIWHGGRLWRPDVIARLDKRIVVCDITCRWERVSNTFNSLEEGNLEKIKKYRVLRSTLEKRYGTKDIHFCGYTVGARGGWVKSSEVLLRHTDASETAIGGFISRTCSTALRQTIKVFGSHSDRFEPVGGGFDEDRLDTN

SEQ ID NO: 1854 - protein, 1078 aa, unidentified
  source 1..1078: note = uncultivated organism;MG140-156 retrotransposition protein
MNIPTTQNGDSSSAPERVTCGCGRDFATQRGLAIHQRKCLTTRGVSTSSIKCDLCDVEFSSAEGVSQHMRARHPAEYNARNAAGTAHKNQRWSTLEVERMAHLEARWGREMGPINKYLEHQMNGRPLESLKKKRQCADYRSLVARYRSELEEAADDDEVFLPSDVQVCVVPPSPPQNTGEIEYPSILGTPVPPRSAPPVMSSLEQRDATLPDQFVEACGTYHERELLEILFGSRADGVKAIDLMVAEIISPHRARGSGEQNASDGAAGSPKPTARTKRSEKRNSRARRYRLAQHMYTHDRARLARSILDDVPLVCDGTPSAEAIENTYAPILESASSGVHLEPTSDKTNSTKISSEQLIELNGPISNLEIINAFSLLKSKANGPDGVSCRRFETWDTGKRLLCFNLMFYWGYIPRELKECRTRLIPKQNIRLDDINNWRPITMGSVLLKTFSKLLLKRLSIVPIHQAQKGFTTDDGVVFNNALLDSIIRTRRAASRPYTIISLDLRRAFDTVEHAAIARALHSRGINGRFPNFIMESYRDCTTSITCGNQTSRRFAVRRGVKQGDPLSTGLFNLVIDQFISSLPVDCGICIENEYIPVLAYADDILLLAPTRREARLLLERAHDFFKNQGMDLNTKKCASLIVETVPRAKKLVARPEEYFTVNGQSIKPVTTDHFKYLGTHYSCFGTAKPTNALFQLEAQRLLKSPLKPAQKLYIATKHLFPRVLARLQHLRVSKTILGRANFIARALVKSILHLPKTTANAYLHAARKDGGLGIPDFIAIIPSIMYKRLGTCLESARGRPFAEVSFRKAQDKFLTIAGGIITSKDTRNRQTAEILEKSYSGNGIHQVGNVKRGSSWIETPPSNWTGSTYIKAIQLRGNLLPTRGIPSNPPGERKCRGGCKRDESLSHVVQGCFVTHEPRIARHNHTFSLLSKFARKSGWAAVHEPTVYLSDESTRKPDLILVNSQYAIVCDVGIYWEGERDLETSFADKLKKYNTEPMIQYMQRRFPDRTVVVHPFIVGARGTLAKSNNRLIDLLSISQADQAKLIHDVIVGSIACHSAFSKRVWCRRQFGYADATH

SEQ ID NO: 1855 - protein, 1199 aa, unidentified
  source 1..1199: note = uncultivated organism;MG140-157 retrotransposition protein
MSQVNNADDRQESGAKRTRASGTSEREDAHDAYCVFYPFDMNGACSRCSGSLGSSMASIEEHLKSHDITKLDYQCGVCHKSWPSWRSAIAHYNRSNCRHTTPSISTTTASTLTTTDEMETEETVKRTTTDTVATIAESTQQQQQEGQPALFYCSLCASGGWSKAVSLSQHMRHMHAEAYNATIEVATTKRRWTKDEVEVLAELEASIPIEDGAYINQILAQRFPSRTYEAIKSHRKRADYRDLVERLRHRGITTRRSEGTTHTGTDSASMTSSTNNNNNFSPNAIVNDGNCFADPGIDASSVPNDYPNTGIPMVVNDEEQYPDIRAYVLQHIMDGRVQLCERMRIAVDRFMTHTSQTVASAVDMSLEGIHQALERVPASDEASNRKKNSVGKPKSTKTKKKMNRFAHYQQLFKKNKSKLASEIFDSVDTSASKPPISDAYKHFQKIWEVEASDTAAVEDTATRGSQILLAPITREEITRVIGQTKHDTAVGPDELTLGRIRCIAGRELWCAFNIWIGMRQIPNLLKLNRTALLPKGSEGLDQIKNWRPITIASLLIRLYNKILAKRMQLVFETDRKQTGFKPMNGVGQNTALLHNILRHARTNKNNLFVCLLDVSKAFDSVPHDSIKRALRKVGCPKEMIELIGEQYTDISTTIAYGTDSSPTIKINRGVKQGDPMSSILFNLVIDELFEIIGDRFGYEIPGVGSVNARAFADDIALMSSSEIGMQQLLSLTEKFLSDRGLELNVKKCIAICLRKAGKVKKSQVADASVKNPPIFKVKDEPIRLLGVKEQCKYLGIHYTPLGAVDPRESVSKLRLALTSLSKAPLKPQQKVVMLRTHLIPRFLHSFTYTECYPKLLGQQDRLIRRWLKTTLKLPASLSSDFFYLPTKEGGLGIGKIYDLVGFAKIRLYSMFARSGDVCLQYLVETQGSSMHARWCQAMKVSYRPPVAELNKRKIVIRDEGRDRFIQTVHGSAHEVFQSSPITNQWLSGQTRIMRGSTFIRSIQMRTNTTPTRVSTTRGRNSIKICRRCGLADETLIHILQTCPITQGMRCQRHNNVCRRVADKLRSKGFQVFSEQGIPSPGLQTNISRPDLIATRGDQALVLDVTCVFETGKHSLTEAYRRKVTRYESLVETIKEKYSVTTVEFHGLCIGSRGAIEPRHLSIWHSIGFSGTELGVLAVSVMEDSLRTITLFNNANKIRV

SEQ ID NO: 1856 - protein, 1067 aa, unidentified
  source 1..1067: note = uncultivated organism;MG140-158 retrotransposition protein
MYEEIMLRGPATAGPVIFAEGAAGVEPQMVICELCTRSFQGQRGLHVHQRRAHPPEYHAQHQVLPRVKARWISEESRRMAEQEALLRLSGVQPRDINKRLTEKFPNRSYESMKGERKKDSYQKLVSELVLMAPVPESEIPTQTPTGPQVEDPVPMDRSLWKVEVLACIKDLIEKRGSPEEEPLWDSLTSAFVSLSGGTVDLSDVKVCLDLHAKRLTDLLGPKRKRRRPPRKVPRKRTRRFAKTGDEANNSSAADGAAATAAPSKRTRSQRKPNPARIARSQAYGRVQAAFRKNRKRCADMILEGKWEEEATTLRLEEQEAFWRPLFEEPSMPDDRPVLKIPENWQIVDPISIGEVVKALADSEESAPGSDEITLVSLRSVSPSMLAASYNLWLLAGFCPDRFVIGETILIPKDGDLKNPANYRPITVASRVTRVFHKIIAARLTNSVPLDPRQKAFRPVDGCADNVYLLDSLLKDAQRRRRPLNLAFLDVAKAFDSVSHYTLARCLRRQGVPEPLVEYVCGTLANSSTVLKVQGRKSTPIVCGRGVRQGDPLSAILFNLVIDEVIAGLSKSIGFELSENLVVRCLAFADDLVLVATSADGLRDQMFHVIEGLRNGGMLINPDKCASLRIDVDGRAKRWVVNPSPFLVLQDKQIKALDIVGTYKYLGLQAGAKGLRKAYGSFLQEKLDWLSRAPLKPQQRMYILRCHLLPRMYHGLVLGETNSTALDQYDRMVRRTIRKWLRLPHDTVAAYYHAKVVDGGLEIPRLRYSIPVMKNRRMAKLESSLDPVMQWVANSPCFLGAKVRSSKAAKVVGQTLDTGRDVQRLLANQLHTTADGRGLRHQRQSPHVNNWVRDGSNLLSGGDYLEAVLVRGNLFQTPERATRGRRTVPPMCDAGCNSTCTLAHMSQSCMRTHRLRCERHNSVLEFIVNRAIAMRHNVVREPVVPTRAGRRKPDLVAEVDGSVLVVDVTIVSDQCNLNTPFKAKVDYYSTDDVKAWVAASYPGKPVEFGAVVFNWRGALNLKSSVLLRRLGVSARDETLLSCRVLTFTANMFKAFTRSTVRKECRSSR

SEQ ID NO: 1857 - protein, 1069 aa, unidentified
  source 1..1069: note = uncultivated organism;MG140-159 retrotransposition protein
MSVNSSERSVGRPIDPGHLENNLGELEVQAWHQCDLCVKQFSTERGLKIHKGLSHKMSNERRPIPQKVKWWTEEEMRLLAHVEYDVRGGGSKGNVGDIVAAFWALGSERPRSGIAQQLNMPKYLSIKDCVWKEREIVNQGVDGSNNNVSNESVSNNVSIGNVDNNDVASDASGDPNSKERWLRRVLCLNLKPEDEEYNGTFSEQWLDEIVVRAISGVDASLIGVELNEYFSAMADGRQVVFKKGPSGPKVVGKNLKRLQFMRTQIDFTKNRSRTVKNILSGVSSNGKSPLDIPGFFDHWADTFKPASNISTTELVQDSNEWSAWDPVVTSEIQAIIQGMDMKKSAGPDRISLSEIKGAPMRVLSKWFNLFIYCGRVPACLKRSRTVFIPKKNEPVSASDYRPISMSSAVLRLFNKILAKRLIGCVKFDHRQKAFLPMDGCAENVMLLETVLDEARKRKKTVFVASLDMRNAYGSVGHEAVVEALRCKGADAKTIEYVRDLYTEYSTVLSVKQEEKNVHVQRGILQGCCLSPVLFNMVMDQLLKKLPNGVGFPLSESIIVNGMAFADDLYLVSTSAVGMSVMLSAVENAARPLGLEFNAQKCSMLVIQSLRGRQTFVDTSFSFKVGGEIIPCLCEGEPLKYLGAFVMPSGKLISGKLLLEEWLGRLKAAPLHAQQKLYALRIHVIPKLIHRLCFSRMNVVELRKLDARIRKFLCGLHGILHLPSSTPKAFFYTSIAEGGLGLMSFRRSIPAMIIRRFERLQVSQCPTISYAAKMSANCTRIASASAALENYEEILGDNRETIRETHKRELYDKVDGNGLKQAGKVRYIHSWVGDGTMCLTGAQFINAIKLRINALSTLSRTTRGRSLSRQCRAGCTKPESNEHVMQICPVNDRMRRFRHDRVVERVALFLEEKGWAVISEPTIWAIDREWKPDITARKGLRAVVIDVHIVGDNVCLESAYDQKVQKYRDAPGLDAKIRELWQGVETVDYGAVVFSRRGLLGAKSEEFRKSVGLTQLNMSQMARNVIVNSLRCIWNFKSVTKSWYVPSTNSGRRNTLAPLASASGVRSNSC

SEQ ID NO: 1858 - protein, 1107 aa, unidentified
  source 1..1107: note = uncultivated organism;MG140-160 retrotransposition protein
MLPKLNLQIRDHVEKCHGVYVFSYVCSNCDTPFEKINSIKNHFPACKRKKTAVAAQDHTVKKVASVPVTDSLECEECKKNQASFVAKCRKGLVTHMRSKHRNAYEESKTVASKRIAWSQDEDKVLAKLEISLKHQHKGQILDRLFCEWNKIAHKAQANHRSKEAIRGRRQQPEYKVLLNSLRNSNSQNVHSDVSESGSESEKDNETDSDTDDYNTSMDAIVKVLESIVTRKGEMLSGHMQDAIDAFCTSDPSRDPVELSMMGIRERVEMIKRNVRTVNGRGPRKKECRNQSRKRKAERHFQNLYAKNKPRLVDEIIDGIGEDSDPPPIEIAIRHYEQIWASTTQGSRMTELAAGAVDQSTAHIMKPVTSDEVTWAIRRTKQDSAKGLDQISLQEIRTLADPALLVAYNIWLGCKRIPAEVKRNRTTLLPKGKDELDKISNWRPTTISSLLLRIFNKILCRRLSQTLKTDDRQMGFKPVNGCSMNISWLHHLLKHARHQKRDLYVCLIDVAKAFDSVPHVAIFNALTRNKLPSSFIDLIKDQYYNSSTTIVYRDLSSRTIRIKRGVKQGDPLSPLLFNLVMDELMGRIGDQYGYAIEDIGSTNIKCFADDICLTSGSRMGMNQLIEYTVKFLEEKGLQVNAKKCVTIGLAKGYKGKKSKIIAEPVFSINNVHIPMLGYRENRTKYLGVKFTSEGTEHANGTLTQFTEALRRLAAASLRPHQKIVLLRSYIIPRFLFQWINLEVYPQLLKKIDLVIRQTIRDILHLPRGLSTEFFSIPVRDGGLQIPLVQEVVSLAKVRIYKSIMGSTDNVLKYLAEMHGYPIIRKYVANLQLTGTYEKEDLEQQKKRLSSERKASYAKKVHGYGSTVFSGCPLANTWLHGTTRTMSGRSFINSIKLRTNSLETKVTLTRGMLTDKQCRRCQKEQESIMHVLQFCPSTHGLRCKRHDLISSKVAAKLKERGFTVYEEKRFRVQRENLTILKPDLIAIKGRTAYILDVQIVYETSDAAFINAYQRKVEKYTPLIEQVEAHHDCRVEAIHGLIIGARGSFYHGHLHIWHGLHFNKNDLKYLAINCMENSLRIMYTFWKSTGAGGKNRCATMITAGQSTGLS

SEQ ID NO: 1859 - protein, 1252 aa, unidentified
  source 1..1252: note = uncultivated organism;MG140-161 retrotransposition protein
MNRVTSQVAISIANMASFPLGTSFPLGTSSTGLVPIRCNEGNNKVLLPAANTPAQEDVCEGEQIRIRPTILIEKGGLMFINGARTLAENIPIWLGHDATDCEMDDTRTWTELVIESDSTVAITVPYTTSTCCKEVFISHSELDKHLSVAHSDAFRRYVCALCMRSRARYRQIAVHYAFCLRSNRKEAVASTPSTLDGPEASLCDTNPYISLAAESSPEDTEEGDLSRRAIPVTKPTFECKECDRSFPTKIGLSQHERYKHPNLRNANRIADQEKDIERKRKARSDSKKLTEETGTTSKPKKSLWTEVEIELLVQLEVELSGARFINMAIAERMPGKTNKQISDKRKSLKSQVTSKARTKKVQNPTPTLVQDTTVVQSEPTIPREDMFNNAICNSGLECVGMSAELLTQAIEGKDIDGLQDKLITIIKSACSKPIKAKPNGPANSTENPSGKKKNKQEEYRRVQNLYSRRRKQLATEILDCKVGSTKCDIDPQIVQETYEGRFGGESQEVNLSKYPNAKPADNNVLIEPITQQEIQKAYSRAKKDSASGPDGIGLKKLKELDPQFAMTSNLYNVWLYTGKVPMEIKENRSILLPKGTTGLENVDNWRPLTISSVMLRLYTNILAKRVIKGVPLNPRQRGFIEAPGCSENGFLLQRIQKHAKRNRKRLSVVFLDLAKAFDTVSHKHIQQGLKRFCVNDHFIETVVDLYTDASTHFTLAKGETSKIPMTRGVKQGDPLSPLLFNIAMDPLLEAISAQNNGYKWDESGLQLEALCYADDNGLLTEDPKDMQENLEVVNEFCRATGMKLNVKKSAGYDIKPSANRSYVINDFHPKWVVDGQKLPLIAPADSTKYLGVKVNSWNGVTKEDLGEKLELWCSRINKASLKPRQKLVMLNQYAIGRLQFYLSQVETSQGKLLEMDLTVRRYAKQWLKLPECATDHILYAGTDKGGLSLPRLSLSVPCSRINVKRAVLNSSDESIRAFAVETGLPEEIDTDADHFRIKVPANPKRGAKWRQLEANRWRKLKVAGKGHRAFGHKCSNSWMRNENNYFNEGDFITGLKLRTDTYPTKVTLARAGNTGGDVACRRCKAAPETVGHISGQCPAVKGYRINRHNGICGILSDRLKEKGWTVALEPRIKAADGKTLIPDIIAVKDRQAVVIDPTIIYENSDHSLQSANKAKIQKYSPLTNEIKTLYGADKVEFHGLAIGARGGWCSQNTKCLTSVGLHDTGFHAMLCRYALRGTINLLRTFTDLHGPK

SEQ ID NO: 1860 - protein, 1112 aa, unidentified
  source 1..1112: note = uncultivated organism;MG140-162 retrotransposition protein
MARAHREVTDQATKEDHNSRRLVRWTPAELLDLAEKEALLMKKGVKFMNEALFPLCPGRSLEAIKGQRRKEAHKELVKAELAKLVTEGLRTAGDEGEGASVEGEEGRGEGQGPSRSGPASGTLDTTQGHLNQRMEPERQNDRQNPRLGTEGRATGLAHLRRDALREGQRQIDMTDSQPEGEEHLTPNVAELLQGAEREVEDGESSCIWTQDVATQEELNEFIRKSTLTTAQSKNAKYEHCRILKGQMELYKDIIGNVWDHEEETGVGADRKVIDDWVREQLLKWVRWEGNPKPKPVRQPDKKQPFISKKKEKARLRQLTQSFYERSPSRCINAVLSGNLEVTQAIPKKELEEYWASIFSRKPEGVVKVDTINRPADTSYSSPISLDEIKEGLRNLKDNSPGPDGLKKSDVAKIPVQVLHAMLLIFQGSSYTPKFLRLGNVTLVPKNAKPENPGQYRPITVTSQLLRLYHGILAKRLVRLPLSKRQKAFLPRDGIAENAFIIEHLIKGARARREDLFLVFMDVAKAFDSLAHTSLLQAAERIGIPSSLREYIALVYEEAEIQFKGGEKKIKQTMGIRQGCQKSAPLFDASLDMCYEKLDPRIGYRVPDPAAPQELCSITQKMRPGGYDITEALFADDGVTVAATRIGSVKNTLLAVRELGKCGMKMNPKKCATLAIRANGRLKKSYVDPTPYLTIDGEVVPALKLGETYKYLGLKIGANGYDIREITKKLIVQLDRLSEASFKPQQRLHALKVNVIGGMLHTLVLVPVSLKTLLNIDRTIRRYVRKWLHLQSDTPTAMFHANTADGGLGIPSMVTRIPRLRRARLVKMTTSDDPLIKIMVSSGTGEAAVRLASGIKRLGEVQIINKQSERRAWREELISKTDGRGLQYHDGFGDGWILDPMFPAKGGEFIKALRVRCNAMKTPARAARGDRGDPTCRLDKQTANATHISQICQVTHGLRVRRHDGIVKMVRAGLQRIGYTVQLEPKIAIEGTFVKPDIVAWRKDKGFVIDPIICGDNCDPEERYRQKVMTYDKEAVRKYVKEEALRVSGANVKEVEVHGFAINFRGGWSTSTQKLLSRLGLGTSLKHFISIRTLTTTWTIIQTYDRVSLGYRK

SEQ ID NO: 1861 - protein, 1041 aa, unidentified
  source 1..1041: note = uncultivated organism;MG140-163 retrotransposition protein
MCGLAAQSIVHTAATEQHKEKGVGSAATDSVCMAGGPSGSPPESSSSCPRCSRVFKSYRGMRVHFRLVHADEFHQVELENVRRQDHKTRWEESEVIEMANREVSLVREKVRFINKELIKYFPNMTVEAIKGKRREATYKKLVKDLLESGPSTAVSPSPVVDPSPSVSPVSPVVRLRIPSVSCDADPDSTLIIGWIGYYLSDLNDRDDIGPPPSEAELNQLDVAVACASEEPERALRLAFAYICSRLELRMIKPRLRKVENVMVDKKKLSKRRRRKIEFAKFQGLYRKNRRSAADAIFNSSSISSNLSDSMVFGYWKDTFTRSDLNVPPLPLFPSPCTQLDVDVLALVTPEEVSSCSLRVGTAPGPDGLTMGDLRKVPVRALAKLFSCWLLARRVNIEFLDSKTVFIPKGREVDTPSKLRPISISSVLVRWWHKILSHRIGLVVNASEYQFGFQPVDGCEQATGMLNKIIRHCKSKFKSLAFASIDLHKAFDSVAHNLLFDVLKSVGLPSHLIDYLRFVYDCGRTYLCFKGSISLPVHPTRGVRQGDPLSPLFFNLGMDWVLGRLFPHLGFRFEENCITHLAYADDVVLISNSVSNLRKLFEQFVEGVQFCGMELNLEKSFTVCWQGDGKRKKVLYDNVSVLSFRNRPIRSLDPGECFTYLGVQFTPNGLARDIKLELMDYLESLKCSLLLPQQKLFLLINNLIPKFIHRLVLGDPYVGTLNKLDNIIRKFLRQLLHLPHDIPNVFFYACIPDGGLGVQCLRWFIPVLTFKRRGILAPSAKFRMFEGVCFSSTSAILDKFRKDLYRSPDGKGLTQSSRVPTAHHWVKKGTRFLSGRDYISCLHVRLGCLFSKSRGGRGRKVDKTCSRGCNAPETLNHMIQSCYSTHKMRIKRHDAVCKLLARQLDTKGFSVFREKVFETSVGKLKPDLVAYREDRVLVVDAQIINDQFHLEEAHYNKIQKYDSPLRDILTPQRGKVDFTSLTVSFRDNVSFNSFKDLSSFGIMSRNFLKKVVTQTLLGGAICWSVFQCMTTRVTPAERTGVD

SEQ ID NO: 1862 - protein, 1090 aa, unidentified
  source 1..1090: note = uncultivated organism;MG140-164 retrotransposition protein
VRCPIAEIMEKTYVENLASTEASSNRRGKEEFTCGCGKFYKSKSGFNNHRRTCNHESVPVTKVFVCEIEECRVSFSTKIGLGQHQRKTHAVQHHDNRVEELRHKKGEWLDEQLFLLAESEIVLTTKGVKFINVELQKIFPNRTLESIRNIRKMAKYKEVICTVKERAIKQLPAACVSSEFSSFSGGHINPPCADAEFPAGGDINPPCYDEVLSLQALVDVITSGCNKLGGKFGVLLNSVRSENLNACSTLIDEIVSDLCIKRVISRVKPIKIQKEIIAPIAKRKKWSPSSCKRRKEYYKMQTLFVLDRKRAAHMAINGSWRDENVSKLPDEVMIDYWKNVFSVCGIPDSRPADNPVNVHWDMVNPITHEEVKRTIKTMSKSAAGPDGMPPEDLRSLDVEAVCVVFNSILWLQDSVPSFCRSRTCFIPKVSSPSSPADFRPISISNAIARLFHRILAKRASLLCELRYQQKAFREVDGVPMNTMILEAVIEESKKSCRSVFVAFLDISKAFDTVEHSSIIRAATRIGFPNPLLYYLRKFYRNGSSSLFDADVEIKRGVRQGDPLSPFLFNAIIDKCVEAVSNLDIGFSINGVKFTITCFADDIVLFAESREGLQRLINLICVELRMCGLELNPTKCASFSIIADKHNKQWFCDRNSIVTVNNLPVRGISILESLRYLGLQFSPNGKVKNSLQHCRIICENLRSAPLKPQQRLAILRDFAVPCLLFTAVLGRWNCNWLKRMDLVVRKFVRGSLHLPHDTPLGFFHAAAKFGGLGIFSFRTRIPLMYNVRMEKIGACTEPDITALLGSLYFRIKMAKRLTSTTGQSAFTSKSNEEMFHRSALYSCKDGKGLNFSFDVKCVNAWVTDGSKLLSGENFIKAIKIRGNLLYTETRSSRGRQPATNCPAGCNARASLGHILQSCSRAHDKIVSRHNAVVKLLAQMTIARKYKVISEYKFSTNAGLRKPDLLIWNGNSCFIVDVTITSDAGLGENILRRANQAKVSYYNKSEIVEEALRFTGTTQVSFGALTISWRGAVSVDSAVFLREMDITNRDLKLLSVRCLENSSIIYENWKRRTTVTRRKWTADRRIGDRAFV

SEQ ID NO: 1863 - protein, 1247 aa, unidentified
  source 1..1247: note = uncultivated organism;MG140-165 retrotransposition protein
MENAEGASNLNLDFGGYGPAHRRRLRPPRGPSDDDLDTNHRDATSALPNTTSYEILLPVPFTSRSCEICLQQKKGDYILLNLNAAIQHAKSHHYGVSVLYACNTCGKTYIGKHAAQCHVPKCRGPPNMEGKDVICQTCKKAFRSQRGLSTHERLMHPLERNEKREKAASNKQTRGPNKGFGKVWSKEEVDTMLRLERSLRGNPRIAKQMMEYLPGKTAKQIRDKRKEPSYKILLKQYASTYESSAAPEPLNILSEGSDNEIEIKRKYRRRCISETEDETNSDKGDATRQLSPSSPVSETAAPGREPAAQHELVPDLPRLACDVLTPSRTHAVDRTINPLSPIGAEINPSDDDRANEQQWRIDTICQALAETRDSANVSNQYRDLHVRLVSILRDISVNNEQITQTLIDDIYSQVLAHIAPSQATKARKRQKTKGHGSQACRGRKRRRYRYARTQDLYKKNPNLLAKYIREGVSWLEEEETGSPKSEDVKTFYTSLWGTSPDITIPFTATGGPGHKALDLGEVFQAITARDVNERLNHTRHNTASGLGGIQRKDIIGLDIKDILRILFNLILVSKMQPTAWNANKTILIPKQGKGSSRVKNYRPLTIGSLIGRTYWGIIDKKLRNVITFSPRQKCFVHETGCFNNVHILNETIKAGKTRNGLVAIQLDIAKAFDTVPHKAVDAALERLGLPTLIRESIMNWYTNLSTVIEYRGSKSEVSLKRGVKQGDPLSPFIFNAIMDPLLQRLEQMKGYEINESHNLSALAFADDLILLANTKEKAQNLLQYTESYLNNLGMRIAAEKCASFEIRTMKDTWYMINPDLHLSNGEIIPYSAADSSIRYLGGHISPWSGLHYRDIVDLLASTLERCRGAQLKPHQKLFLTTSHIIPHFLHKAVLATPPISTIRAMDQIIRNHVKVVLHLPMSTPNGLLYCSKRDGGLGITKLEALVTNTSLKQGITLLNTLDPAIHALLQETKLEQPLISLAKAIRLPWPILNFRVIDSYKKRVKEDELKNWSQMKTKGRGVTAFKDDRDGNAWLYNPNLLRPSRFLTALRLRGGMTSDKVTMNKVVPQLNVKCRKCKSCNETLAHILGQCIHTKSQRIRRHDEIRDFVSRKLASKKEEISIIEETLIPTQTGNLKPDLVVVNQGRVHVVDVTVRHEDTGYLDEGYRSKVDKYTPILDILVHQLKVEKGRVLPIVVGTRGCMPVTTIESLNEIHIKDRGSYITIALLALRHSIEIYHTFMDYDRKDT

SEQ ID NO: 1864 - protein, 1205 aa, unidentified
  source 1..1205: note = uncultivated organism;MG140-166 retrotransposition protein
MQPNMMANDYNDASDFDGHGPIHRRRLRPTRGPPNDEPAMDTDNASSNGCPPEANSTAPVTEISLPYLTHSCNRCLEQGLGQYILLNINNAERHFKVHHRGERLLYRCSSCEKRYESKHAALCHAPKCPGPKEPIIAGITCDICHRTFSSQRGLAQHERIVHPATRNQNRANQANSDTQRPIAKGYGKIWTKTDIDLMIQLELRLTGHPRIAKEMGTHFPGKTIKQIRDKRKEASYKKLLQSHLDGPTEDVNPPLGLGEETYIDLSGADSTTGSGPNPQMEESRGEEPRDMSEEITRSIPTPMADIEAQGPAVLHTPNANWISQITDQVLEKAPNHDTADESHRALYAHLTSVLQDARENRGVITQGLIDEIYTETKLLILKESHPKERTRPRPSRRADGHKKRKHKRYLYARTQDLYKRNPSTLAKYIREDVNWLSDEGVEVSQEDISLFYTNLWGTAPDINLPFDTRTMADETIDILEFSAITVQEIQARINRLKKDTAAGPDHIEKRHITSQHAKEAMRLMFNIILISGTLPSAWGTNRTVLIPKQGKDTRNIENYRPITIGSILSRIYLGIIDNRLRERTTFSPRQKGFVNEAGCFNNVHILNEILRAAKLNSGITVIQLDISKAFDTVPHKAIPPALKRLGVPAEIISSISASYEHITTNICHKGSKAEINLQRGVKQGDPLSPYIFNAIMDPLIEQLETLQGYHIDASNTISTLAFADDILLLADNRDKAHELLHHTETYLKQLGMQIAPTKCTSFEIKTSRGTWYIADPDIRLGTNIRIPATPANGTLTYLGGRISPWFGLQHSDLENKLRATLRRLGSTLLKPHQKLMLLSTYIIPHFLHATTLTTPPITTIRGLDSIVRTYVKEFLHLPSCTPNGLLYCSKRDGGLGIPKFEILSVTTALKQGITLLNTLDPAAQALFRLTLLEKRLEKMAKSARLLWPIQNFRSIDAYKQRLKKAELEQWSKLPSKGKSVLSFANDRYGNEWLYNPELLKPCRFITALRMRSGTTSDRVTISKAIPQSSVTCRRCKSSLETLAHIVGQCINTKPQRIRRHNDIRDFVSKKLASNTDKFQIIEEASVETPTGALKPDLAVISQGRVHVVDVTVRHEDMGYLEGGHRSKVEKYKPLLPILAEQLQVTPGTVLPIVVGTRGAMPKATIASLSDLGISDRSSLITISLLALRSSIEMYLAFLDYDAPGR

SEQ ID NO: 1865 - protein, 1226 aa, unidentified
  source 1..1226: note = uncultivated organism;MG140-167 retrotransposition protein
MYNQSKNHRAGSSVNYYEGRVWKHGQFPSGTSFIRCAGEQRRNDSAHQGLGHGLVLSTSADKGLTEPPKSRSPVSQQRIGRTHHPFLPTLQYYSQGGWKDSLGRQTRLHEDVGEATDDDEEVRTVGICPEEREGGFSILIPSKAWTCHLCPLRGDYDTMRRLVNHLHDQHRGIEYVFRCRKCGRSGEMHGTEVHAGKCKGYTSCPVPDSHPHQCEECPMSFTTKTGLGQHVRHKHPVLANIKRIAAPQIEKAMKKSQRAVGMIRLWDAVSTRALVRILAEVGQGRGHLEQVRVGLEALGYAFSVKQISDRKRTKAFIQMSDNAVTATVAPQPQSPPRVYSTGGTVRAATGPKAPASQSLKEVLDGAQISKHLGHLCGQAMEVLEKAEDGKDEDSVMCQILKELSSALQAEKPVGKSQGTERDRKGKPRRSKKLSKRANQKANKYRSLQTSWRTNRRNAVRTVLDNMEQTGCEIPPEEVEETYRERFEKTSPKVDLSRFPPPKVNITDEGLDVMGQPITPSEVIKALKGTKAMTAAGPDGVAAHQIKMKCGDGVLLSIIFNTWLTSRKIPPYLKESRSILLPKTKQDLEKIGNWRPLTIGSVLTRLYAKILAKRLSDQIPLNPMQRGFIPAPGVSENTVLLKRIIREAKKKRGTLAVAFLDLAKAFDTVSHDLVQKGMKRFGIPEHLCEVVGDMYEGATTRFKVRGGETGPLHIRSGVKQGDPLSPILFDMAMDPLFCLLEAEGVAWNASRSTPVVAMGYADDTAVLSRTLDGMKKNLRLVSRYCDAVGLQLNVKKSYVFIIKSSGKTFTVNDCDPLTISGQPIPWVGPDQSTKYLGKQFGPWVGLERPRLLAKLKEWSERIRGAPLKPEQKVEIWRDTVIPRLASSLVNSGPPKAQLVELDTVIRKGVKTCLHLPEQTTDQLFYTPLRRGGLGLLQLEMHVPRLEGKVLKALANTKDEHIARLAEALGIPQESLAVTPVCLPRYHHTWAKQPVQGKGVETWAYHPVANHWLKGKTLSSGEFIAALQLRTNTYPTRECIARYKKGLNVRCRRCGSSVETVGHVSGACPAVKKARIKRHESICTIVAKKAAGVGWDVKWEPTFMVDGASLRPDLVLVRRDTVILVDPTVVWDGRKEDLAKARKTKRDKYECLRQSLADKYLPDVASPKIIIEGLPIGARGGWLSNNDWLLKQMGLGSKGAAKALSIRAIGGTLRLLQIFSDVSFMRFG

SEQ ID NO: 1866 - protein, 1009 aa, unidentified
  source 1..1009: note = uncultivated organism;MG140-168 retrotransposition protein
MSGATVVGGTGSDQSPECPTCGLIYASFKGRRLHERLAHPEAFHSAEDARLTARPKPRWDPEELSLMAAYERAHRGEANINISIARDVLPHRSLESIKGKRRSAVYRALLAVGAVSEDQPHDSIPTGEELPGAPSRPQLPPSSPASDTETQEGEGPPARVEPPLQVALQNTLEGLSNILAVAVPLNTENIQSKLDEWSPPRSVTCSRPERRSRRRHLPRSQKGRRRMQYARFQHAWKKDRGRAAKRVVDGDNWLGEERPLPEGTTDFWLSLYERPSPPPVPGRILPARDCVEREIWKPISVEDVKMALRATKAETARGLDGRCKADIEALGMDKLRWLLNAVLFMGLPPASWVRGRTVLIPKIDEPSTPSDYRPLTITPVLTRILNRVLAKRVSTWAPLPRSQRGFREEEGCAANILLLKAALRHAKAVPSPLYMAFIDFKKAFDSVGYPAIVQACHRWGLGSKLSSYVENMYKKATTTVDGVLVTPTIGVMQGDPLSPLLFNMTLDWALSAAPQEVGVVIGGTKFQYLAFADDVVLLATSPVGLRRSVGAVTTAAARLGLEVGHQKCASLAIAADKKRRKWVQSKIELHIGGQAIRALTPGKFYKYLGIQVGSTEWAEGPSRLLARLVTGLGRLQRSPAKPQQKMWMLVNSLLPQLVYPLLHSEARAGTLKRLDREVRKFARKAFHLPHDTPVGYFHAAVRDGGLGIFPFCSRIPRLKSDLLSRLSRLSPDPSVRAVAEGASGPHPCETSSSRKRLEEEEWRNRLYDSYDGRGLEGCRQTPVSSSWLSDGTGLMRGGSFIRALKLRGNLMATQTRCARGRQRPSVACDLCHGMRPESLGHILQQCPAVAGKRIARHDGLLDLYVTSLQKQGYQVRREPAIPTPAGVRYPDIVFWRGGTAYVVDVQVVADAAVGNLDTAHRRKVTHYDVPEIRDYVVSLTGNHPIFSSFTISWRGVVALPSCNTWDSLGLPKATLKLMVVRALEGGAAIHTAYRNTSGAKVRRVPRVRD

SEQ ID NO: 1867 - protein, 1331 aa, unidentified
  source 1..1331: note = uncultivated organism;MG140-169 retrotransposition protein
MIVPLVFNGQDHPSGLSKWVPVRLGMGSTLRWRSCPACVFEVGHVWNWRINLPSGRWDQPLGELSRVPNGTGATASSPPLPVRKTISVAIQVQESDWPICPEVPSVVSESTAYAGSARSVESVEGARDPQPGEVDVASESTAYAGSARSVESVEGARDPQPRGVEVQERDWPILPEVPSVVSESTAYAGSARSEEPVEGAREPQPGEVVGAMYTLPEVVRADSPRVGADTLNEVRVLLPWLASDCPLCGVQVKGIVALGKHFAIRHAGVTAMYVCGKCGRSNISRHSISCHVPKCGGGVAAAGVEGEPASGFACDLCDARFPTPVGVSQHKRHAHAAAWNEVRLARRKVPGGEIRATKLWSVGEVQTLIQLIREHGDTVATYQLIAVELGNGKTAEQVRSKRRLLKIDMAGDCSNIAEEEDCSLSDPIPQAERSSPPSPQVLSSDRIREALVGWGDREGGDEVRAIASLVKDVDQNPFLIESSASELISKLGGGVERTGRARPPVREQNQARGWVRRLAQRRRAYRECQYWYSRDQARLAAQILDGAESQECALPPDQIYEAFRERWEGGGQFHGLGEFRTDLVSDNWEFYNPILAAEVRENLSKMSNGTAPGPDRISKKGLLDWDPRGEQLARLFTTWLVRGVIPRAFKECRTTLLPKSTDPGELQSVNGWRPVTIGSMVLRLFSRILSMRMARACPLNPRQKGFLASSSGCAENLLMLDEIIRRSREDGSPLAVVFVDFAKAFDSIAHEHILCALGERRVDTHVIELIRNSYVDCVTRVNCVAGYTQPIHINRGVKQGDPLSPLLFNLAMDPLIHRLELARFGLQWGDQGRISTLVFADDLVLVAGSVEAMNGSLGILEEFCQRTGLSVQPKKCHGFYMDKGVVNGCEAWRIGGAPIHMIPPGESVRYLGVQVGPGQGIVTPDLIPMVRSWVMRISEAPLKPSQRLRLTNTFVLPRLMYQADLGKVPATKLAQIDGLVRKAVKQWLHLPPSAGNGLLYSRVRDGGLGVLRLERLIPSIQVRRLYQMSRSPDLWTRTLTKRAVMQLDWEKLWIKAGGDAGSVPVMGTGEANPPDAGSPPVYPDWRRGENLAWAALEVQGVGVDQFRGDTISNSWIADPSAVGFRQRHWIAGLAVRTGVYPTKEFLARGRDKSGAACRRCLARLESCSHILGQCAWVQGSRIRRHNKVCELLATEAERYGWTVTREFRVDGPEGGLRIPDLVCKKADTVFVIDVTIRYELDGDTLARAASEKVARYLPVAAEIARRIGGRCAEVRGFPVGARGKWPSSNNTVLMELGIPVGRRRAFARLVSRRTLLYSLDVLRDFLREPEG

SEQ ID NO: 1868 - protein, 1240 aa, unidentified
  source 1..1240: note = uncultivated organism;MG140-170 retrotransposition protein
VQESGGVRGNSATTSSQENSSDTYCLYYPFETNRVCERCHEELGSTTTNIEKHLKSHDIHKMEFKCGVCHKSWPSWRSVIMHFNKSSCRHKTPFDSSADSRGTQQSSSIVHLQSDQVEKQQATDDVIAEVATVVTSKKSSKRKQEVVQNSASNQTVDKNKTDSAPRKEKQQHKGNDDDAYPTAGSAVEASTTRKDLEETGESETTEQKKLLYCNLCAAGGWNKQVSLSQHMRRMHMEEYNAKIDVPMIKKRWTKDETLVLAELEASIPSTDGAYINQVLAQKFTSRTFEAIKSHRKRPDYRVLVQQLREQYLTLNLEGATCTEMSSNDNPIVNDGNCFVGYDDSSPKDSTPETQGRIDSEVYPDIREYVRRNIVDGKVQLSNAMNNAMLQFVNDVKCSDPVNETLKGIHDALSNRRVSDKSRGEKRNAGSKLKSLSTKRKVQKFAHYQRLFKNDKSKLAAEIFDDVDTSANKPPLSDAYEHFRKIWDKEAKDTAAVEDTVSRGTDVLLAPITREEIALAIDQTKSDTAVGPDHIPLDSIRSIARRELWCAYNIWIGSRRIPDQLKINRTSLLPKGNEGLDNIKNWRPITIASLLIRLYNKILARRMQSVFLINRKQTGFKPINGVGQNTSLIHNLLRHARINRNNLFVCLLDVSKAFDSVPHDSIKRALKRNGCPHDLISIIGDQYENINTCITYGTEKSPSIPIKRGVKQGDPMSSILFNLVIDELFEVIGDRFGYELHDVGSVNARAFADDIALISGSEIGMQQLLLATEEFLAARGLEINVKKCVAICLRKAGKAKKSQIADATVKNPPKFMVSNEPIRLLGVNEQCRYLGVHFTPLGAVDPRVPVSTLRLALASLSKAPLKPQQKVVMLRTYLIPRFIHTFTYTECYPKLMGQQDRLVRRWLKETLKLPASLSSDFFYLPTKEGGLGIGKLYDIIGTAKVRLHNMFARSGDVCLQYLVGTQGSSMHARWCQAMKLDHRPSAADIKKRKIMIIDEYRDRFSNTVHGAGSEVFKSSPITNQWLSGQTRLLKGSTYIRSIQMRTNTIPTRVSTSRGRNSVKTCRRCGLADETLMHILQTCPMTQGMRCKRHNNVCRKVAEKLRCKGFQVFSEQGLPSPGLQTNISRPDLIAKRDDKAIVLDITCVYESGKHSLQEAYRRKVDRYESLAETIRGTYQVQEVAFHGLCVGSRGSFDPRHLSIWHSIGFSGHELSVLAVGVMEDSLRTITLFNNANRLLLRE

SEQ ID NO: 1869 - protein, 1181 aa, unidentified
  source 1..1181: note = uncultivated organism;MG140-171 retrotransposition protein
MSQVNNADDKQGSRARRRSGNGNSTSDKEDSCDAYCVYYPFEMNSACSRCQEMLGSSMANIEQHLKSHDIVQLEYKCGVCQKPWPSWRSVITHYNKSSCRNTTPTISSGITTASDTQMDTEETDKRVATPESEQPEQQQQQQQQQQQELFYCKLCAAGGWSKAVSLSQHMRRMHAKEYNSAIEVPTVKRRWTKDETQVLAEMEASIPSDDGTYINQILSQRFPSRTFEAIKSHRKKSDYRDLVQQIRARGTGALFEGSTCTDVSSLNNPNPVVNDGNCFAENENDDSSPNDSTNIPAAVSDEEQYPDIRLYIQNSIIDGRVQVCERMRVAISAFMNNGQNSDAVNISLEGIQQAMKNRKAPNEASTEQKNNVSKRRSPKAKTRAHKFAHYQQLFKKNKSKLASEIFDSVDTSASKPPISDAFKHFQKVWETKASDTAAVDETDSRGTAVLLAPITREEIARVIEQTKNDTAVGPDEVTLESIRCIARRELWCAYNIWIGMRQIPDQLKLNRTALLPKGSEGLEQIKNWRPITIASLLIRLYNKIIAKRLQSVFATSHKQTGFKPMNGVGQNTALLHNILRHARANKNSLSVCLLDVSKAFDSVPHDSIKRALKRNGCPKGMIELIGEQYEDISTTITYGQECSPKISIYRGVKQGDPMSSILFNLVIDELFEVIGDRFGYEIPGVGCVNARAFADDIALISGSEIGMQQLLSQTEKFLSCRGLELNVKKCVAICLRKAGKVKKSQIADSSVKNPPVFTVNAEPIRLIGVNEQCKYLGIHYTPLGAVDPRESVSRLRLALTSLSKAPLKPQQKVVMLRSYLIPRFIYTFTYTECYPKLLGQQDRLIRRWLKETLKLPASLSSDFFYLPTKEGGLGIGKLYDIIGFAKVRLYNTFMRSGDACLQYLVETQGSSMHARWCQAMKLSHRPPVADINKRKIAVIDECRDRFQQTVHGGGHEAFRSSPITNQWLTGQTRIMKGSTFVRSIQMRTNTIPTRVSTSRGRNSIKTCRRCGLADETLIHILQTCPITQGMRCQRHNNVCRKVAEKLRSKGFQVFSEQGIPSPGLQTNISRPDLIATKDDRALVLDITCVFETGKHSLSEAYRRKVTRYESLVETIKEKYRIQTVDFHGLCIGSRGAIEPRHLSIWHSIGFSGTELSVLAVSVMEDSLRTITLFNNANRLRI

SEQ ID NO: 1870 - protein, 1413 aa, unidentified
  source 1..1413: note = uncultivated organism;MG140-172 retrotransposition protein
MRAGRCLFPPCLVDPSVVGRRLKQCNWYRITLSESVSLSWWREVCTHQIKLMATNAVISGASPMPVGEHGGTQRGSYGDFESGAAQITPQLRSEDPMKGAKFKNGPLPTTPGRLSRAARLARRRPNTDGPVGQTRMDDHLVQSGIVRVIPGGGLVDTARETEDLTDFQDNEKAVVGRKRRRTVRKDWLTDRGGAYGTGTDSTPRSGERAASVMGVNRTPDQPCSSSHTAGELSQGGSREYLSEDSQTNTAPCGSTPSVSGTATGSSTEVVHTQPATPVSEVRGGAEPSPVLLTVSPWCVSLPLNDPCCGLCGKVIGAVTAMAKHLRICHHSTQVIFECGKCGKTGGSHHSISCHVPKCKGEKERMVAGGFTCETCQNTFTTQAGLSLHRRRAHKDLYRREVLVRERARRGKNVLRRKWSATEVEGVRRLIPSVKHLKSPNLFIAEQLGSDKTGRQVSDLRRSLGSCCTSGAAEAPDWSDLVRELSIARDPTPSRFGVQLRLLEAFEKRETEGDGIQSGATPRLWMGAIPSPAWIRSSALELLEELGRGADGPRVETARRDERGATPMLTGRRAGRRAKYRLHQKMFSGKRSALAYLILDSVAKRSCPVPMSEITSVFSDRWGGKDTFSGLGQFISGESVSNEFFWSPISASEIRENIRKSKHSSAAGPDGVTQSDLVKWDPSGCRLARLFNAWLISGTLPEAFKENFSTLIPKSADPTELESISNWRPLTVGSVVLRLYSRILTLRLANACPLSPRQKGFTGSSGCSENLKLLEGLIRRSRICGVTLALVSVDFAKAFDTVTHGHILSVLELKGLDRHVLGLIRDSYVGCVTRVKVGSERSPLIDMKVGVKQGDPMSPLLFNLALDPLIQTLESRGEGYVWDGQSVTTIAFADDLVMVSGSWTGMAKNITILETFCELTGMRVQPKKCFGFLLSKGAYSYVENDCNPWLVCGESLRLTGSEVLERYLGMELGPNTAIGLSEPFLKLQGWIDRIGRAALGPSQKVEILTRYAIPRLLYQLDHGHARITLLNKLDLLIRGAVKRWLHLPPSTADGLLYSRCQDGGLGIVKLARQIPAVQARRVFRLSLSEDPLIRMATASLYPREKFERLWLSAGGLLEEVPNRGGGPIEAGNSSGVPDGSKARRPVPCNWRRESFQGWCGLSIQGQGAVVFGGDKKSNCWLGNPTECGMTEAQYVAALQLRANVFPTLEALTRGRGENPPCRRCNSLVESCSHILGQCPAVQSSRIARHDKICGLLTEEATKAGWSVINQLRIRGPAGELRIPDLIFVREDRAMVVDVTVRYEFALNTLMDADAKKVAYYKPYAAEIMRELVGVAKLRFFGFPVGARGKWPSCNDRLLSRLGLSKSRAKRFAMLVSKRTVLYSLDILRDFQRPLVKGVPDTRTRSEPEGNETCL

SEQ ID NO: 1871 - protein, 1047 aa, unidentified
  source 1..1047: note = uncultivated organism;MG140-173 retrotransposition protein
MRTCDGTPIAPGTSGLRKRDRTVYAARLAQLEEGEQWQCTDCHLIFLTEGSLKVHRAVKHPSAYNDELLETKRHRVTESELRRIAREELRITQGTIMDDARGLVDELFLSGVANRSIDMLRKIRARREYQEIRLNEFQALQQRLQADNTNDNGDIPAEGIPTHIGEDGNDLNQEGVLRLKAQAEVLRYILHPTAEEADSIHPDILAYANAALQGRDTWLETRDKLLPPHKPRRNRPVRVGRGPLRNHRRKNRFTARYERFKLTQELLRDDRKATLNKIFEGQELTRSEEFPDIVDVENTFVERLENNDSQDTSPTIFGEPCEPCESTSFGAFPADFVLEVHNKIDGKSAPGRDGVIKKQLTKLGKVNLAIIMNLWFWRGIPPDCKKNRTILLHKKGDRKVVDNWRPITIGDLLVRLYAKLWDTRLRKVIQIEERQQAFRPVDGCLNNVKMIQYMIKQSRKNKKELNIVFLDLSKAFDKVLHTSIHKALLRKGVATDVIDTILTDLYGGASTEVTIRSNKSTRPINIRNGVKQGCTLSPFLFNLVIDELMTRLRESKLGVSVGEELVAGMAFADDLSLAATSAEDMVELLKICEEFFDSKALEVNATKCSSLRLVPATNSKRMKVITTVHRWWKNTGIPCVTFEDMDKYLGVKITPLGEVLINVQEWKRRLENLRKAALKPFQRADAIRDLLVPRLIHLLRLSDAQKSVIKRVFGPIKTAYKRCLHLPDWTSDSWLHHPKGGRLPNLLLTIARSRVRSTVKMAKSSDRAIVTMGLGLEVKAQKLKRLVGFDGIEDSKWEETEELNRRLKLKGELNGEARLTMLKSSHGRGWWLWSGNMKGSYMVNTLRMLSGTLPTKINTTRGRPDLSKLCRRCHATAETDIHVLQICPANQSLIKRRHDIIVRRIGADLRDKGWTVAIERVFMIASGRRHPDLWMYKDNVAILADVQIPYEKDEATLKDRLNKKQLKYDELLNECGFPDTATERKVLGLIIGAAGTMIPETETPFRELQLKSKLNTYCRLAAEGSSKIWFQHTGNWTPEVLAEHAGT

SEQ ID NO: 1872 - protein, 1040 aa, unidentified
  source 1..1040: note = uncultivated organism;MG140-174 retrotransposition protein
MFGSSARNERSTDALVPTRAALLGNTAGPTVGPPEPPPPHTPPNICLECQALGVVKVFGTKSGLSQHRRKAHKAIYMAERLESDPPIKERWTDEEIRLLALDEAKWVSEGCLGKFVNKHLAGLHPNRSCNAITAARKLKRYKDALKVVTDEGSLPQPARIPAEEQEPAPSTWSLALKATFLSVVLGSVDLSEVLPGQPSNLSQTAVDEDFAGWLPVAPPKVFKHSPQAELPENSRKRRRALYARTQQLWRKSRKRSVDTVLTGAWAIEAPSIDRTAFIGFWGDLLRTGSKADHRPVTPIREVAWSVLDPITPGEIIETLKGMKGGTAPGPDNRVLRSVRQMEPAALAGRFNFWMYSGCTPSPLYEGYTSFIPKVPGNVEPANFRPITVSSIITRCFHCILARRLEALCPPSLRQKAFRSGDGICENIEVFKETIRHAQHPKHPRDLFLTFLDVRKAFDSVSHESMAKAAERAGVPPPLVIYIQNLYRKASTSLRLGSSLSDPIRVGQGVRQGDPLSPILFNFVIDWALAELDPHLGFDLDGIKLNHLAFADDVVLLSKTQAGLQRQIDLFSSHLAGSGLILNAAKCSSMGIKVVGGRERHTWVVDHRGFAKVGGTGIAAMEVGEAYKYLGIQITNNGAHSKAKEKLTKNMAELTHAPLKPQQRLWILNTCVIPALYHDLVLSECTQGFLESLDRDVRAAVRTWTRLPKDTVIPYFYTDSKAGGLGIPSIRWTVPQLKVNRLSRLVESQDPVVRKVAGLANFQAKIRKWSKASLLEGEPMTSSLIRKNVWSRRLYATVDGRGLEQSSLVPGVHDWVKDGSLLLSGAKFNAALALRGGTLPTRVRASRGRGVGVPDCDHCGVGHKESLGHILQTCGRTHGARIKRHDRVLAETSKALSKLGYTTLIEPHIQTESGLRKPDIVAYNVARGISAVIDVTICTDNIEVNRAHFKKVETYAQHPEITRYVEALSGGREPFYSGVAINWRGAIAPQSAQDLRTMGVSERTLKLLSVITVEQSALIHRLFNTNTARRIPDQNPFFDPP

SEQ ID NO: 1873 - protein, 1089 aa, unidentified
  source 1..1089: note = uncultivated organism;MG140-175 retrotransposition protein
MEREILASGRSQSSKGGIVQLLENSRIVERTGNAIAKARQRADYKAMLASGQVRGGQSGSSFGPTGVSNDPPVPGRDANDSDSGSDFDMDVDTEPIVNSVVENMSGGIERGSSSGSDFDYGGLAELQGRRSEASYEGPQSIPRVLLEENSGEQVFLAENSSENLEGTRSILGGGIDSLSQVSKSLFYHLRSDLLGLDRELLAAQLSADPESVVREHFESFTAKYPVERWKPKLAPVRVIPTGVKRRRRFLYRQIQRSYTKRRSDCCREVVTGDWEKGNQSAALELADVEPFWREIFEAESVPDPRTPEPIREEVLAVVAPISIDEVKTAIKQCSSKTAPGVDGFRLQHLRAVPAAELAAVYNLWLLAGRLPAALDEARTTLIPKERGTVDPAKFRPITVTSILTRLFHRILASRIERCCPINQRQKAFRKIDGMSENVLLLRFLLAKATDARRPRPLYLCFLDVRKAFDSVSFESLFLALRRVGVPEHLINYFRSVYNARFTRVYSGANKSAPIRPKKGVSQGDPTSGILFNMLIDWVLTELDPTIGFPLADSLTELNDLLTYLAFADDLLLAAQSVFDLRRQVDLCVEALRKCGLEVNASKCRVLAIKVDGHTRQWACDESAEVFIGGNRVPTTKISDLLAESRYKYLGIQFGVRGTFLNVENRLLSEIDHTRRAPLRPEQRMFILRQNILPALNHQLVLARCSMSALKKLDRRIRVAVRTWLHLPHDTPLAYFYANPKDGGLGLRCLAYGVPALKRKRLATLTASEDPLVKNMVASSWFTKLTNKWSSPVVMTVTPLDSNGEGGDTLPFTMNLSKAESDYGWQTALYRGCWDGFGLRETAGSWKTQRWVTSGGGLITGKRFIGAIALRGGLLPCKARSTRGRQRANLPKHCDCCGPGWQETLQHILQVCPRTHDPRSKRHNEICKLLVHQLRRKGWEVVVEPRIPYSGTWAKPDIIAARLDPESGVKAFCLDVTVCSDQYGAANLAHLGKIAKYSEIGGGVPVVSNWVRSWAAETFGPTYGCEPRYTACAISWRGIFSRLSYESLSKELKLSAADLTLLTVRTLEWGAWIHRFFSRSTARVRRRIRR

SEQ ID NO: 1874 - protein, 1093 aa, unidentified
  source 1..1093: note = uncultivated organism;MG140-176 retrotransposition protein
MTSNDLSRSLLSTGSQVLHQSGPASSRQGVSSDGGNTLADKSSDLSTNPLGEPDATSSSSSSMDVRNQDIEAHRRIDPAPTTTSSETTPSFTAPGKSPTCPTCSRTFASFGGRRVHESRAHKGTFHTEAKQIAATKTRLRWSYEEHLLLAKAEASYTGPVEEQPDVAAKYDHLHGLFPERSREAIKNQCLKNKAYQEILRKVLDQNNTSSGEEEEIPIDSPSGEELHSEEGIEDTTSVDDLTPTGQQWQEVLRDSISKESKKTAAHTCVGNRKRTDRQFTKWLKRHMSEMPKKPAPKPSPPISGNRASRRRKMRAAWMKAYDRNPGRTAKLVLDGHQLDRSVEYPEGTTKFWKELYETDSVKWSGREEATLQESTKHQALLRPFTIDEVTAHIKSMRAGATGVDKISLRDIRKMPVDELAEWFNLFLLQGALPRVLKRFRTTLIPKKKNPTRPSEFRPISVGSFVRRLFTGMLARRMNIVETHHCQRGFKKMEGCALQSYTLRAIVDGHIKKPNDLHYAYMDVRKAFDSVSHDTLRKAYVRSHLPAGFIHLLEDMYVGNTTILSADPQRNIVRLRRGVLQGDPLSPTLFNLVMDDVASGLDRDIGAELGSAKVNCLMFADDSVLLANTLQGLQHNVNLYVERMAAYGLELNASKCAAVHIKADRQHKRWYIDPTLSLLAGQEKVPSLTIGQSYRYLGLTTNVNKGLLSAHEQLKSMLGRLSASVLKPQQRLAILKTNVIPGILFETTLEHRTDVALKDLDIRVRKEVRRWLHLPKDVPTSTFHTGVREGGLGIPSLRTRVPRLQMDRFKRLMETPDPDEWILALLGSPYWRKANTDAAASLARAGVQDKVTEQDHWSKRLYASVDGSGMLNHSNRSGYSSQWIDPTFLQMSGREFVGAMHVRCNSLVTRERATRGRISSKGRNCPCCPDKRESLAHILQVCWRTQNHRIFRHNSIMTMIVNKLRKLQFSVVVEPRIPHGKTFLKPDIVAVKDGTVHILDPSIVACSRNLVLAEADKMTKYQVTDVKRWARNKYGMNKVVVAGLIMDWRGAWAPRSVQHLKYLGFKVGNIELMSFKILKLSRWIYQCVRDRTDA

SEQ ID NO: 1875 - protein, 1060 aa, unidentified
  source 1..1060: note = uncultivated organism;MG140-177 retrotransposition protein
MERGIEEKQSSEAAKRSTQSRQDWDMIARTEVDLVVNRGKYPPELPEDLSDALIAINQQAEVEHQEPLWKDKAYNTLRTKRSKQEWRDKLMALGLAKTATLAQGLSAKVAAQLQAEAETSQADEILQLGEEDEVASQSSSGSDFIMSDVEVEEEPASSPARPVVVEAIVEAEPDNPSPGEITWHSHVVPKLTSLGFTEEELRNLSPGVETTENQRIVDEQFLIFSQKYPARPLEPVKRKTMVLPRNRKKRRAVQYRLIQRAYIRDRARAAKTVLSGDWKAESEDGAATLEAQESFWRPLLERESIADSRSPDPIREEQWGLIAAIELEDLEMALKASPGKTAAGPDGRTLGQIAKMDRVAVLRQMNLWLVSCCLPSALCEARTTLIPKVLGTTEPSKFRPITVASLLVRLYHRIIAQRLEKLCPCSERQKAFRTGDGIAENVFLVEQLIRDATQRAVPREVYLCFLDVAKAFDSVSHESLLAACRRAGVASPLLSYIGNVYRRSATRLWVNGAKTEPIACKQGVRQGDPLSSMLFNFVIDWALSSLDPQLGADVGKVRVSHAAYADDQVVASGTKTGLQANVNTLVSELGKSGLSLNAAKCMTVALVVDRGRKKSLVDSQSFITIDGKQVPGQKASEYYKYLGLNISKKGSSTTILERVKKQLQELSKAPLKPQQRLYILKANVIPGLTHQLVLGRVYKGFLKHLDCEIRKWVRKWLKFPHDIHLANFYAKVKDGGLGIKSLEFTIPLLKRRRMVRAKCSSDPAIVEATRTMDFEKSYGYWIKPLRTLVPGFPMDDSRSQDMAWGSVLTQSVDGKGLSFAVKCPSVQDWVSDGTSLMEGRKYCAALNLRAGTLPSGERMDRGRNTGRAKCSFPPCGGIEFLGHILQCCDKTYEARIWRHNRLMGKIIKSLKRLKYDYLKEPRIPVVENGVRTTRKPDIVFWSERKGLSVVLDVSVHRDNLETANTGHEAKVAYYDRAEVREWVKRKTKVEPEFSAFAVSWRGIVNPQSAEDLKKYGWSKFHIKLLAVETVESGCYIHRLFQSETTQTRRRRVQRQVNSIP

SEQ ID NO: 1876 - protein, 1142 aa, unidentified
  source 1..1142: note = uncultivated organism;MG140-178 retrotransposition protein
MWSPEDDHALAREAVAVHVSLRENGLGGIVGEGKISPRDLAKAIFRRNAHGDGLFPGRSEEALRKRMETVQRYQVLVAKLLSELEARPERSNPGDEERIRSNSSLSVQPEPVEESDLRQGSPPTTHLGPPEGQGAMTDLFVSVESLGPDYEADHDPPAGESLHHTTHVETVSGLGSSEVGVDPGPGIQPGAQEPPPPGPYSALLESLRPEEGSQDTIDLTGLEPGVACPQNRSIVESQYQLFSQVCPSKAPTVKRGVPRPITRQSGLPRRKLRRMRYFELQRAWSKNPAQTAKKVLDGTWGSEQAPIPMEEISAFWKPIFEAPSKPDNRTVEPIRPAKEDCMEPVSLAEVESALKGSKQDAAAGPDGRNLADLKKAPAKQLLARMFNLWLTTACIPMELTESRTVLIPKEMGTRDPAKHRPITVSSVLIRVFHKILAARLDTHCPPSDRQKAFRSGDGLFENVAILKSVLHSARGGDIMDQGSGKVKRGKTKDVALIFLDVRKAFDSVSHQSLLLAARRAGVPEGLLAYIQTVYRTSTLKIHAGGEVSENIRPAQGVKQGDPLSCFLFNSCIDWAISELDQLGTEGIGFDMGTYLLNHLAFADDLCLLAASPQGLRVLVKSVETQLAAMGLYLNAGKCATMQVIKDGRNGKTHVGTQSIVSLSSREGETIPVTALGIGDTYKYLGITFRPKGTYTAVKEKVLKKITAVNSVPLKPQQRLHILKTNIVPAVWHELVMAEVFATDLRQLDRVVRAAVRGWLHLPKDTPIPFYHADLRDGGLGIPNIEQKSQSLRLSRLLRLMASSDPAVQAAWSTGVIPAEIQRYSKRLCPSSDTIGLRDLDKHIQSANTARELHDNRVDTAGLRCASNAVLGTWRRPVGHRWLSCPAADKIKGSMFCQMVALRAGVLETGVRRDRRLPPPDQWNVATMGQRPSPRCEACAPALQPSQAHHVDGNMYLDTLNHRLQKCAKTHGYTVYRHNRLVEVLEGFLTGRGAVVKHEPGASGDIKDPGGREWKPDMFVTMPEGTGGSLVKEVWCIDPTVTTDGHKNMDTPHFEKVNYYSSVPCVEEAMKSFSGAELTRFSALAISWRGIIAPTSLRDMSSLGLSKTQIEILCQIVVEQGVRIYRAWSKTTHRRGISFEGRA

SEQ ID NO: 1877 - protein, 1184 aa, unidentified
  source 1..1184: note = uncultivated organism;MG140-179 retrotransposition protein
MLRGLTSHFALISHVPNHRNENKTGRKDQFGSGPTGNPSDGETGIGRRPRVNAASGNSGGGLETDAPTASSAPSPAEHFCGFPGCGRSFATANGRGQHERRGHREWKDQQNSQLAPSQGSSRGSQWTYAEDVVLARAELAWEVLPHPPRQVNQHLVAANPALTQFGRTAEAVKKRRQNQQYKNLLRELRETGPDVLAPGQLESAAGGDSDTPDDVGLMGDRVEPAAASMTQNNQEVSRYENWRTRMIASIKDSPLAELFTERSLEEFGLEGEVRMHRHQEYVRTLYLAWVEENLKAYAEDPYDPTLLGKQRRRKGVKSSNRAIKPTPTETNGEPPRQGAKPRDKGSRSRRHRRRNGVSDRRSARTRVRDEARFRAQKAFRQNPHEASKDLIKGKFAVPITTDVGETRASDGPGTEGPPSPEELKAYWGGLFQTESTENTHRIAAGETIWELCDPFGTAEVAKHLKRANETTPGPDGLTLDFLKWGCKLAELTGWFNVFLLVGIPADLLSGTVTLVPKVARPTACKDYRPITVTSRVLRAFHSLLTGRFQEKLALPHEQRGFRKLDGCRDNIWCLQELIRTSTANGTKELSIAFLDVKNAFGSVSHQAIFQACLRKGVPSPVMSHIKRVYQNTSVTFKGDSAKQQFHVRSGVLQGDPLSAELFIHVMDFATSLSIHPTIGVGGDGEGEDAGRVCSYLAYADDMALVARKAVELSLQVGDLEKAMSSLGMLLNAGKCGTVRIACDSHRKRTWTDSNSFLEVNGDLVPALGLKDTYRYLGLQFSPTGITCTVSKQLGDGLKNISSAPVDPQQRLFALREVLIPQLAHQLVLGVATGKTLKEFDRSIRQKVRAWTHLPHDTPLGVFHSKVRDGGLGIPCLATEVIRWRADRLKRLYLQTSHPLIGWLLKRPDVAKRLERLTAGVRPPGWDHILSSRQDSIDYWKHRLVQSVDNRGLKYASLSKGSYDWVRAPTGLFRGGEFVKALAVRHATLKTRLRASRGRARESQSVRCHLCKDQLHSLSHLSQVCGRTHGQRIARHDSVVTVLEKACLRKGLRVIREPIIRTGPTLKDALKPDLIILKKNDAWVIDPTIVSDSADLRKQDEAKRMKYSSPRVKEYLRGIVEHPEQSTSLTVRGLPFSWRGVVLWDAWREIESSLGLPRAVLDLCLLKVLVGTWKLWYFETRLRTR

SEQ ID NO: 1878 - protein, 1112 aa, unidentified
  source 1..1112: note = uncultivated organism;MG140-180 retrotransposition protein
MEERVWRKCQGNSRPSTGNFKGETLGSPARGSSANSTRARSVGETPLTLWLKKPKVGSAAASENNTDAVALAPCVTGDGAPDHSDSSEEVNTPKDSSVCDICRQRFNGARGVSVHTRRMHPTESHARAQRQSDGRKKPWNDEERYTVAVEEARLVKAGVERRRLNGMLAEKFSDRTECSLKCERRQARFQAILSTVTKELNESRPRVYTVEEDSTVPNDNSVVPEWRLTLAHALQKKRTSAYLCTTSSLLNREFKRWMRNFPVRRQGARRKVQQRPPAKKGNRNARRRRLRAAWLDAYEKNQTRTSKRVIQGANLGEEEEYPEGMTEFWSEIFEKPSRPTGRAERDPWGKEESPLLRPFTGGEVKFHLRSMKSGAPGVDGVTLQHLKAVDPYCLAEWFNCFLLLGMVPRVLKQFKTIFIAKCEDPSSPTQYRPITIGSYVRRLFAGILAKRLNKSNTGGVSCQRGFKEVEGCAINQEILRAVVDGHIGARKSLNYVFLDVAKAFDSVAHSRLDGAFRKASLPKGLGDLFAEMYRGNTTTFSGGTRVIRIKKGVLQGDPLSPVIFNLVMDVAVRCLKESVGAALEGSKVSALLFADDAVLLSESVSGLQMNVDRFVSKLASFGLGINAAKSAAVHIGVNGKKKSWFVRDTSSIVIQGEKVKALKVGESYKYLGLKLSLGKCVSNTVKDLDVMLQNITRSVLKPQHKLAILRSHAIPKVEYALDLGESSKGILRDCDRHIRRAVRKWVHLPKDVPISLFHVNIKDGGLGIPSLRTKIPRLRKQRWIRINSTENPDPQLAGLLASPYWRMKEESQELAAVAGDSQGDTTYNLKMKEREYWRDALYSTTDGEGLRSHSSGSSYNSKFFDDNFLRLTGKEFVKALHLRCGSLRTPARSNRGRVEGRGPMCPSCPDKVASIGHLLQCCGRTHLQRVGRHDTIVKELARKLRTLGYETVLEPHIPVGQSHEKPDIVAYRKEDQKLLVLDPTIVNCKCCLDTLAAEKSAKYSNTAVFEWLVAKYGACGRRENVTVEGIVLNFRGAWSPRSAQTLLDSGVRPGYLEVLSFRVLKLGNFIYDSLWDRPDWGRSWRDRLARRKKAPSRGGVAHRGRGQRALTR

SEQ ID NO: 1879 - protein, 1206 aa, unidentified
  source 1..1206: note = uncultivated organism;MG140-181 retrotransposition protein
MNVKPRAGRVLALNNYPSPRQWVNAPLSLYISRIPNDKLQNTPRIDGAGVGSSPRNGKRPRRELEEPGGRGGCPPSGGECTSRPLTVLTAPVELHSCPYPGCDKAFKTKRGLGQHERHIHREERDSQMAQSLPANRAGQRWTQAERVVLVREEQRLYRENPNIQPGVMNDSLSLFSTSTGFRSVEAIKKARKTAAWIACVEEERTKNSEHLARQCPIPADLTEARVLDVAGSPSESDPNAAPSLSRRSSESAGPSDAPPDEFAKMMRQVRLELLSSFSSERGPRVTPVDDCLTLIRANLDPALLGESLQEAIRASFDAWTATLRQGETVYGRSARTSQKPEKRAQTLEQETGVHGSELPAKQKPKSERRRKRVRRSKRSAKRAGLRRQHKSSFESNPFLAAKQILNSTGSFQAEGGDQAPSGMPIEPLEAYWGEVFSAQSGEDSDNRVSPMSLLGTEQAETRWSLCRPVLAEELEQGFRDANTKSVPGPDNLTWKALRAAPRQDLLDWMNLFLLAERPASSLLQAVVTLVPKVQIPQEPGDYRPIAVASALLRIFHSIIARRWDVELQLPSEQRGFRQCVDGTFENVFILRNLIKSAKRSVRKIALCFCDIKNAFGAVSHKAVLIACQRMGVPAPMVSYVENVYKDFCIKFKGGSGRLFSVNRGVLQGDPLSSVVFNCVMALVMSSQRRQFGVGRTGNSREVNNDARITTYASYADDTILMAETRLEMQSNFAELQAALEKVGLRLNAKKCATFELDKAGKQKKTFVRSEPFLKVEKVNVPALGERDFYKYLGIKFSPEGTTGFVTPVSLQRDLARVGAARIDPQDRLFVIRSVLIPRMHHSLVLGQAHGKALRELDRFIRKAVREWLHVPHDTPLGFFHAKARDGGLGIPNLATEVPRLRADRLRRIVESPTPLIKWLMGDEAIAASVSKDCDAERLISRLGDFSTKEASRDSWRNLLVNSSIDGRGLAIARNCPQSSEWLTHPNCGISGKEFVKAVHMRGNLLRTPARAGRGGRASTSCFHCRGTTCGLGHILQRCPTSHGCRVARHDSVVGLIAASIRRSAKFQVVEGPIISKEAKELTKPEKDALIPDLVIYNRGEITIIDPTIVSDHSTMRDLETAANHKVVKYNSEVVRSWAREKFAKGRELKSFKVIGLPITWRGLWRRDDFGAIIERLRLPANLRVLLAIRTLVFGWRIWSSFSQKRT

SEQ ID NO: 1880 - protein, 1144 aa, unidentified
  source 1..1144: note = uncultivated organism;MG140-182 retrotransposition protein
MNKNTREDREAAESFGTAVDRGTDGAAGTSSGVVPDAFGGGSPPDPPLGFLRCPDCNGIYKGKGGLGVHRQRAHRAKYEEEKGARAPRHHVWRDEERRLLAREELRLLALVPPPKNINQALQASFPDWSIESIKGQRNKSKAYSDIFDEFKREGERSGNGTTEVQRPGGAVGRPAQDPDAHALEETNPDTDLPTQQGDPMDHVALRGGGPDRDDPDSVPANQSLERPLETEAGDIPAADVPGPIENVESERQNSEQDHMAQLSWAFKGFFELHREDLGGIFNGEVFVDDRVQIERWISEKVEHVFGITVDASTPPKGKGKARRPPPETETRRQRKARLRQLTLEFYERDPNACGKAILADTIDTRDTVPEERKEAFWTDVFEKETAYSGNIPEPLEREYNWRLSHPITKSELDSALEKMTESASGLDGVTLADIRSCQLHTFVLILNVMWRTNVIPKWLSDGRVTLIPKVAQPQSPKDFRPITVSSMLLRVFHRILARRLDTLVIDEAQVAYRQVDGCQTNLFILSSILRDSHQNREPLFAIFVDVAKAFDSVSRGAILAAAKRKGLPPPFLSYLENIFNQSGVWVGKRYCKQNNGVRQGDPMSGALFNFVMDYVYSQLSEDVGYPLREHHPDGSKSLIALIRHLLFADDGVIFANSLQGLDHQVQRVVRAFAECGMKLNPSKSMVLGKVPAGGGDKAMITAPESQAQLLIDGEKVPVMTTEGSYKYLGLLVGPRGFLTGYPESLLDTKLDRLQKSALKPQQKLQVLRRQVICSIMYAVTLGEVSHGRMLAIDKSVRKFVRKICHLPHDTPNSALHADMKAGGLGVTSLALTVPINRARRLARLFAKPGPIVQHLKEVSHCIKKFDEGQRIFSHNGVQILTKKDAVEGLGEELHKKVDGFGLKPHARCRQFDQWLYDCKMSIKGREFVLAVKTRLGCLNTPSRALRGGRGRTLDDKLCWRDRQPATLNHISQYCDSTHGLRVERHDQVVKMIHSSLSSRGNKTLREPRLAIENDRVLIPDIVTIDKERKAVSILDPIICSDFKNLEEVSNIKREKYNCEPLKKSACDRILGEERPAGLKVHVSGLAFNCRGAVAPSTHSILRTLCSRRYCAYIILRILVWTAQIVSQYRRTVHVSRRRGEARRS

SEQ ID NO: 1881 - protein, 1084 aa, unidentified
  source 1..1084: note = uncultivated organism;MG140-183 retrotransposition protein
MPSRWVTISNQTGLPTQGGGNLLGGTSSNERLEAPAFSSIEQPMSSERPQASQQPSVVLVGKCELPCNICGRGPFRGKAGLAQHKRKAHAEEYHLAHAVEIAPEVIETAPAGPSGTSAPVRSSGKLWCDEDRIILAKAYLEAEARSEKVGPKALMGCLRNRTYDAIKGQLKDPRFKELLELSRTHEGVRPLANAISGGSDDNNSPVQDLSQACDQSEQYLTRLRETLESSPLHKIDLLAPNMLPSITSQGLVDNDLEEWLPAGTSQGKRAKGTTKLPKNARKRRRVLYKRVQTTWKYNRKRCAEEVISGAWEREESQVSMDQLLKYWEPLLTTESRIDNRRVDPIREEQWGAMVPFTIQEVNDSLKGMKASTAPGPDQKLVSDLKALPLEQLRYRFNLWLYLGVVPMRLCEGYTSLIPKIAGTDKPNEFRPITVSSVLIRLYHKTLSRRLERLCPPSVRQKAFRSGDGIAENLCILQALLKKAQDPRVPRDLALAFLDVRKAFDSVAHGSLLKAAERAGVPKPVTEYIGRFYSNSTTRLRFRGGLSHVISVKQGVKQGDPLSCILFNLVIDWALDQLSEHIKFDVGNSVGFNHAAFADDVILAANRKDGLQAQVNLFTDHLQKSGMTVNAGKCATIAIVVNGKSRKWVVDPRRFLKIGDSPELVKALSVADTYKYLGIQASASGSTSCAEGKLERLLRQISRAPLKPQQRLWILNTRVFPSLRHDLVFCRTGKGFLRHLDRKVKTAVKGWLKLPKDTSDPSFWASVSDGGLGILSLEHCVPEWKRSRLTCMQFATTDPIMIELLAGNWLRKEIRMWSKPVTWRAHVMNCAETRSEAYRTELYRTIDGRGLKSASLVPAAHQWVSNGSSLLKGSYFNAAIGIRLGTLPTKLRASRGRSEVDTGCKCNYSWRGRYVAPTVWHSECLSHILQKCALTHGNTIRRHNRVLEALAGIFRRRGFQTTLEPVFKIAGGAHLKPDLLVWGDGRPSMVIDVSICRDDCADPNEPHYAKVQKYGEHAQIKEQVMLMTQVVPVFSALVINWRGCIAPASAIDLKSAGFSDSDLILLAALTVEHGAEIHNVYRKIV

SEQ ID NO: 1882 - protein, 1063 aa, unidentified
  source 1..1063: note = uncultivated organism;MG140-184 retrotransposition protein
VGNHIFLSGVTARAGLRSLVPTTNLINSNLCSDLAATAAGARDVGGNLLCGWENVDGSECEFVGKSKSGLSQHRRSRHAERYHNEIANDIAARGSSKTLWSTEESSLLISNIRRMRRENGGVELSRKRVGELIIEAHLTTRTLGSILGELRKGPYQAALTGGDLVDMVVAPAPSVQSQVVPEEQWNSRIAREEALGNLRELITGLPEGADLQAITPGQSCEANQLVADLHYRAFDELYRIKTKEPRGGGGRTARINPKGVGKSCRRRRAQFARIQRWFKRNRGRCADAVLSGTWSADTPDIPMRDQETFWRGIFEKPSNADARTPVPVRQEQLEVIRPISCNDVKLACAAISADTAPGPDGRRKSDVLGIPTAEMANLFNIWMYLGCQPSGLHLGYTTLVPKVAGTDQPAKHRPITVQSILVRIFHRVLAGRLETACPVDERQKGFRPGDGLAQNLKILESILQEAQDVRKPRNLFLCFLDVRKAFDSVSHESLILACRRAGVPEPLVCYIESIYREAKIALRVGGQLSEIIRVLQGVKQGDPLSSVLFNLVIDWAVAGLDRNIAASLCKQQISYLAFADDMVLFSKTREGLQRQAEHFVSGLAASGLSLNAAKCRTMAIVVQGKQRKWVCDPAAFLRIDGEEVPGNSITETYKYLGLEFNPREANSSALAKLVERTRQLSKAPLKPQQRLWILKEKLLPSLLHDLVLSKCTYGLLADLDRRVRLNVRSWLRLPRDAPLPFFYADVRDGGLGIMNLRFAIPPLRAQRLRGMLSCADQVVKAVVSTATFKNQLSKWSRQGVFNGYYMSSKALCRTAFRESLVASADGRGSRHANLAPGPQRWIDSGRLLLTGARYIAAVGVRANTLPTKARCGRGRPDAIRHCGACGPDVLETLGHILQICPRTHGARINRHDIILRLLAKRLEKLGWQVKVELRITTSAGLRKPDLLAFKHGCQAWVIDVGVSAVSVGSLDEPYDQKVVKYSTLPEVSEVVVAEVGVAPLFSGFILSWRGDYSPKTMRDAHEWGLSMVDLEFLAAICVEQSAVIHRVHQTSTLVRRGRRGPGL

SEQ ID NO: 1883 - protein, 1110 aa, unidentified
  source 1..1110: note = uncultivated organism;MG140-185 retrotransposition protein
MCPIFEKNPNSCPSGGILYKGVRGLNVHYSRAHKAEHHAGLEAKASQSAPSRKWSDEEVKLLAHAEFIWRCEHPAESVDMAQKLIDLEKTERSYAAVRKIRTAPKYKEFYATLGAPPGVPKGKSVSQIVGQFDEESLEDDPLNTAFAVGLDCTGTRSEPASQNSPTARSNSSPLPPNVNMTPTQTAQPRANGNPFVDSDSDEDGDRMFRTPPPSPIAANPSAVSPPVDLAVVPPVVSQSDCWADSVRAALVSLETSIDLASIVPSGGEVNQASVDSDYSIWLPPRPQNPSGRLRTPPRKLPTNKRSRRKALYSRLQRMYKRNRAAAADTVLDGSWEKDGSSVPLDVQDRYWRNLLETPSRPDSRNPEPIREVQWELLSPISQFEVKCALKQMKRKTSPGLDGLTVSRLKSLPIDRVVGRFNLWLLAGCIPSSLREGYTALIPKEFETADPAKFRPITVSSTLIRLYHKVLAARFEQLCPTSVRQKAFKAVDGCGENTAVLQSLLKHATDPGAPKELYVAFLDVRKAFDSVSHESLVLAARRAGIPEPLLSYVVNFYASSSTRLRVDGKLGDLIRVMQGVRQGDPLSCWLFNIVIDWSLTALNPAVGVSLQSEVLSHLAFADDLCLPASTREGLQTQIDAVSAHLRDSGLNLNAAKCATISVCVTPGRTKTWYCSKARQFTVAGESIPSLDVSESYRYLGLQIRATGTDANTQEVLGSMLRSVTAAPLKPQQRLWILRNKLLPKLQYALVLGEASLTVLRHVDCTVRAAVRKWLKLPNDTPKSAFYADVRDGGLGVQSFEHVIPSLKVRRFCNISSSSDPVVREVCRFPWFRREIAKWRKPTTLGGLLTTSTALRRQAFAHNLLSKVDGAGLRDAPLVQGQHSWLVSGNSMMSGAKFCAAVGLRLGTLPTRARGTRGRPEKSGWCDCCGPGHVEQLTHVLQVCPRTHGPRIARHDRVLSEVAKVFSRLGYQCTVEPHLRTPVGLRKPDLVVYGEGKPCVVLDVAITKCNLLTPDQRHIDKQRYYAQPDNPANSISTQVEALTGQAPVIYSSCVLNWRGLFSPASAADLRSFGFTERDIGFIAALVVEQGAVIHRVFNTSTHVVHHARGLRT

SEQ ID NO: 1884 - protein, 1048 aa, unidentified
  source 1..1048: note = uncultivated organism;MG140-186 retrotransposition protein
MADKPKQSAGLCLERGYWVDTPLVRLKSVSTQNIYEKGETVIPTVDPTEASVEGSDPYSMGLTCPNCSMVFKSQRGLSVHERRMHPVQYHSERIPRQRVKARWSTEEKYLLAKTEVALERQNLRFMNQELAKRFPARSVESIKCQRKQAAYKQLLEDVRAQQSSQPIHDRQEPGEPEEGGEDFAEGEQPWFVHLLESLQGVSFATPLSLDSIVPGKPDGNTRRLIDEEYESWAKKYPAKRIRGNTNPNVPRRSPRNRREAKRMRYAALQRAYTKNRGDCWKSVKTGDWAKEKSTLPLNDFDPPWRKIMEEASLPDGRDVDRVSEPIWALITPVTGDMVKACIKNMPKTSPGLDGIELSTIRSIPAEELAAHYNLWLYAAYQPKALREGRTVFIPKKVGTSDPLCHRPINVSSFVVRLFHRILAGRLVDHLPFNERQKGGMRGDGVAENIWTLSALLQRAKSDLTSLCVAFLDVRKAFDSVSHETILLAAKRLGVPLPLLTYLRELYTDSYTVFQANGQIGDPVRTNRGVKQGDPLSSYLFCAVIDWALASLDNSRDIGVCLGDTSLNCLAYADDVVLVSSTPAGLQQLVDTFAGHLALGGLVLSTGPDGKSKTIRIDVDGKAKRSIINPHSFLKVSGESLPALDAAQTYEYLGVNMSAHGVTTNVKKVLDAQLTCLSQAPLKPEQRMYFLVHHLLPGLYYQLVLSKVTLGYMDWMDKSVRAAVRKWIKLPKDTPVAFFHAKECDGGLGIPNLKLNTILAKRDRMGRMFRAQDPVLKEVTQMRSFRADYNKWHREAKVGDIHISSRVNLNEAWRDALYKSVDGRGLASAVSVPYAGQWITDGAALSRGRQYIGAIHIRGNLMPTATRRARGRPEVDIQCESCRKPESLGHVLQQCPRTWSSRIRRHDDIVALLAKQARKKQYTVLEEPVIPTSAGIRKPDLVLVKDSAALIIDATICADNADLNAVHSRKVDYYNKPEIVSWVRSSTGVETVKFSAAALNWRGIFSPMSYAHLKRELGLSTSVLNLVSVMCLERGYRIWRHFVQSTERF

SEQ ID NO: 1885 - protein, 1045 aa, unidentified
  source 1..1045: note = uncultivated organism;MG140-187 retrotransposition protein
MDNTQRNEIGANLDPQTRLAHSEIESFVCRDRNEPSGPECGRSFPTKIGLSQHRRRAHQAQYMRDCEQRLASQPVNAKITQREIEQLAKTEVELDRMRGSGSTISNDRAKALVESGKTNRTYNSIRSLRQKPAFKAAVTQFSQNQPEIPPTPVLNDTEDEQVPTEHNFRGEWERTMLLELQVGIDEGCLAQTDIDVLIPGEYNEQNVAIVNRMFDNFVAKYPATTRPRPRPNPTPRLPTQARKRKRALYRITQRLWRRNRARCAKQVVSGDWDKVGRPTVELRTLEEFWRPLLETESKEDDRNPPRKPKDESWGIAQPISKSDVEESLKSADINTAPGPDGMKLSDVKKIPTVELQAQFNVWLYTGTLPSKLCEGRTTLIQKVAGTNEPRMFRPITVTGLLGRIYDRIIARRMESCCPVNERQKGFRPLDGCAHNTYLLRGVIAAATDSSCPSSLYLAFLDVKKAFDSVSHHSLLKACKRIGMPEPIIEYVRGLYERGSTRLNCGSGEHSEPIRCKQGVKQGQPSSSCLFNFVIDWIMESCDSSIGFRIAEQLISYLAYCDDLVLLATTQDDLQRQVELVTTAMGKVGLSVNPAKCATMALVADRGRKLWFLSTEKLVKIENDWFPVLQTEDSYKYLGLAFNQHGASQSIEKKLMAQLDQITRAPLKPQQRLWILQNNVVPATYHQLVLAGVTKGALDYFDRVLRQKLKQWLKLPHTTPNSFFYADCKDGGLGLKCLRWIIPEMKARRMIKIQRSADPVMAGLALTDWFQKEMAKWDLNARSLNDGTPMTEKWNRDMAFRLELFSTADCYGLEYAHQVPYVHRWATDGNLGMSGHRYCAAIALRSGVLYSRARSARGRPEANSSCDCCGPNVVEHLGHILQVCSRTYGARIKRHDLLVMKIKKMLEYHNWTVLVEPKIRTPNSETLFVKPDLLAWKEERSVVLDVAVCSDDLAPDIAHEQKVHKYSNVPQIAQYFREMGKEPPYFSAFAVNWRGVVSPKSAADLRSFGVRKCDIRLLSVATVEQGTVMHRLFQQSTARSSGWRVG

SEQ ID NO: 1886 - protein, 1163 aa, unidentified
  source 1..1163: note = uncultivated organism;MG140-188 retrotransposition protein
MGLAHPCLLKCPATTSQNPKGCSKELASASSNGSQLNQSSELSGRSPRSRTPVLLLCPVENCPKAGAEFKGERGLNQHLRRAHPVLYHAEQSRLEADSVIRRLPVSSEESRLLASREQQYLLNNPDFKGDTSQKLVDLCATTRSYDVVRKIRQRADYRAALASVPHPGGTQLTSSLADGNTQDFLNAAFIGGSDGLSPDRSTADISVQSRYSPSSPNSQSNTQDRPTTMPRSNVNPFVDSDDSSDDEISSSPSHRAANTTAHHFGSPFNSQPNTQNSQGSNSQNSQAPVGEPVEAQQWVKDLRSSLDNIDTSIDLAAVQPAAGSINQVLINSDFIEWIPLVPPTNSRRQTPPRKLPENKRARRRALYSRIQRMYKRQRAKAADSILEGTWDQDVSDIPLLRQDSYWRALFESESQFDDRSPPPIRDTKWSLLSPFSQQEVSDALKNTKPNTSPGLDGRTVSSIRKLDPQQLVSRFNLWALAGCIPEELHDGYTSLIPKEIGSDDPAKFRPITVSSAVVRLYHKCFAARLDADCPTSVRQKAFKHVDGCRDNTLVLQALLKRATNSSSPKDCFVAFLDVKKAFDSVSHESLLIAAKRAGVPPPLLEYFSYFYSSANTRLRVGGQTGEVINVGQGVRQGDPMSCWLFNVVVDWALAALNPAVGIDLASGVVSHLAFADDIALLAQTRQGLQENIGLVSDHLRKSGLSLSAGKCKSLSIVVSKGRTKKWYCDPTPRFRVAGEFIPSLGIAETYKYLGLRFNARGANSDIGDSLASMLKNVTAAPLKPAQRLWILRHKLAPKLQYQLVLGETTAGYLRFVDCTIRSAVRRWLKLPHDTPKSAFYADIRDGGLGITSFEHLIPSLKVRRFCSMVSSTDPIVREVCTLPWFKREMEKWRKPTHFAGLLTSTPQLRREAFKYDLTAQKVDGRGLRDSALVQGQHAWVENGNVLMTGAKFSAAIGVRLGTLPTRGRGSRGRPDSGWCDCCGAPTVEYLYHVLQTCPRTHGPRIARHDRILSEVEKMFTRLGYSTLVEPHFKTSQGLRKPDLVIYGEGKPCFVLDVAVSADNLPDPDTRHWDKVRYYSQYEEISAAVYNISGSRPEFSSVTLNWRGLFSPASHADLRRLGLTERDVGLLAAITVEQGAVIHRVFNTSTMVTHRGPGIRNIGR

SEQ ID NO: 1887 - protein, 1169 aa, unidentified
  source 1..1169: note = uncultivated organism;MG140-189 retrotransposition protein
MCIAPRSQRNENAASGSSQPTQSSGVGGPPFNCPYCASSYTTKTGLGVHKRRAHEDELMREREQQSRLKISRSRWTPQEERLLAIAEIALLRHRPELTGDDRKISLALSLGGTNAIGRTAESIRKRRLTDTYLHALNTVGLAGIPSSSPARRSTRSQTRQANSGLAPGNNTQELLEPTVEEIPLSPAISTPNPTPPTLSPSPSLSLTVEANSTSPGPTQEEEGIISAENQPVPEEALVEASEDPILLHVSDFESWKQSCLASLDIDAESAQLLEPGQPCQGNQAIIEQEFAKFSQKYPPNKLPRPKNRLPTAPQTLSKRKLRRLEFKMIQRAYKANKSRCARQILSGTWKIRDAQTAGSGRGGDHVDRDQLSAEQLFAFWKETFEHLSITDARDPASVRGTQWEVIKPITLDELNLVIKSMGKNKAPGADGRKVSSLCEIPPKDLLAQMNLWLTGGGLPACLCEGRTTLIPKVIGTNDPAKFRPITVTSVLVRAFHKVLTDRTEVHCPVSHRQKAFRSGDGLAENVLILQSVLKIATDTRKPRNLSIAFLDVKKAFDSVSHHSMLLAAKRHGMPGPLLRYIENIYSEGFTKLRSEEKESGVVKTKRGVRQGDSLSCPLFNMVVDWATSHLEPDLGFQLVSKMITHLEFCDDLALIAENDLFLQRQMNLVVEALGKCGLEVNPDKCTSISIKANTRMKNYFVRSEPAVKVGGKYIPALSITQVYKYLGINFGAKGTEQSAEPRLREAIRQISKAPLRPQQRLHIFTHHALPGVLHTLMLAKVTKGYLQNLDRVGRLALKRWLKLPGDTPTAFFYSHAKDGGLGILNLSDEVLAMKHKRLTKLGSGRDAELMSEICQLEVNKKIERSLYQAVTGGNPTRLEKKARLADWANKLHESCDGRGLRNSSYSFTLKQSPFGATQQPIGSDWLKAGKSDLVPGFEFVKMIGLRAATLETKSRAFRRRGDYNLPNPYCEHCFNTVLDQNGQALVQPMIDSLSHRLQTCSHNQGLRIRRHDSVQKRLVAYLKKSGWSAEGNPRINTSSGLKIPDLIIRRGSVAQVIDVQVGSDNYLDPDQGHKEKVEKYSVHEEITRYALNGLSEDNPKQVGFSACLLNWRGFWSPASARDLKRFGVSNQQLETLSKIVVRWGVSIWRKTRDSTFRVNTGLRRRLGIG

SEQ ID NO: 1888 - protein, 1220 aa, unidentified
  source 1..1220: note = uncultivated organism;MG140-190 retrotransposition protein
MPLLPLMYFGSGSINEQRCDEPKCRHQFTGIKEAEEHMRTVHGISDGWKCSKCHVEFDQGNRVAQHFPRCSGPPVAAPVVEKPHKCMHCDRSFDTPNGLGQHMKKTHPVEFDACAPALKKNRVTSELIDLIAQAEASIPAQKVDPKRLNLDILTALQKLYPDVAATVDRDRIQYIRARSKQHKVAYEERVSHHRLLADNVQTWARGLPPPRRQRLGAPRTVSPLVTVPDTSSNPPSPIQHTPPEPLVLPQDDSTPDGSSERTPPHSSQPPSEVAAVSNMGDEPEETPPSPPGGDSGGDPPSPSSPASSSEDAQDGPLMEAIKGKLRDILRNRTNSPLVLDINTVIQECLLVETWNEDAKQHVFHRLEEVLKKHRPKYWEEREQERVRPRREAEPPFLRNRAARRKHRYAKAQRLFKSRPKELMRPDILSEGPQEEAYAPTPDEAYETYKGRFGVPSKEEESEATPVGNEDLNLIWAPLSKKDVESALRTMPNSSAGPVYSKFNKAALKSLGSQALHRIFLIWQLICDVPDWCKENRTILIPKKPVPRSINDYRPLTIGAHLSRLYTRALAGRLTQHLPLHPRQKAFRPVDGCGENLALLEGVIADARKRNNTLYITFVDVAKAFDTVSHHSIERALRRLRCPTPFVNLVRNLYKGARTSIHLNGESTEPIHITNGVKQGCPLSPLLFNSVTDELLHLLGNEGGYRLPNGDLIASMAFADDLILISSSREGMVRSLRTMDLFFQARGMKVQPPKCCTIGLEKRRGGGLKSDLRPFSLIDPTTGERSNMRVMGPDAWTKYLGLEVSCAGLKSGRQLREEGITSLKQTLAHLHRLPLKANQKVHLLRTYVIPGLQYKWTKGPAALNMLREADRIIAAKVRAWLKVFPSTPMAFFRVPSSDGGLGIPSVQDLVTTGKARLHAKLCGSADSAVAYVAKNLLWGKEVRHYSRRLGGFQLGGSEDGANLSRKVREGHRRTLQTSTHGRGAETFRDDPLGNSVINDVNTKTGLVIDMVKLRTQSFPVRIAVGPTQRGNQVPYNTTCRVPECTRDESLSHVLQECPAVHGLRVQRHEVVDQQCTKWITDKGFHTLKEPHVVSRVDGNIYKPDRFFCEPGSDTLYVVDWTVPYETTRDAMKSAERAKELKYSPHKASLLLKAQEAFPDKVFSTVTVKGVAFGARGAILPATREFLHKKLKMSKRCISWVQHRVAQKSIGMVKCFFAGNRG

SEQ ID NO: 1889 - protein, 1174 aa, unidentified
  source 1..1174: note = uncultivated organism;MG140-191 retrotransposition protein
MWSTPQKAGARQGTARGAGEGAAPGSVDRASGVVVRSRLLLKRKREESPAGTPKKRRVPPMARKALFPAGKREGMIFMSVVKGWKPEPAGKGLPPTVMVGLRVPWLAQRCRLCDTHLGTVRTAQTHMRKAHKPRMIQFICDKCASTFKTPHRAACHAAKCGAARSGAGPTTGYACDTCPKTFSSQRGLSVHERRKHLGVYVSKAREQKERETEVSGWSRAELATLESIHESLGGKTGFLEAAASALPHYTRAQIQNRWRNLRRLGRKPVDKSPTGVARDLLPNLEEELPPRAPVALVKEHLARTVRAVSVDSVPPLSSSCKAINRYLKEVLTKLRSRCHPRVVSTARKTGSDRQNRFKMNRRLRYKNLQTLYRRNRSSAARWVLDGRERAVCRIDPKLVAETYRGIWERDDCFKGLGQFASLPEADNTSLFPPISPAEALQALRRMDQASASGPDGVERNGLLMWDRKGEKLADLFNAIMYSGRLPRCLKHSRTTLIPKASDQSKAGDISNWRPITIGSVFLRAFSRVLTQRLTEACAIHPRQRGFTDAPGCSENLAILDGLIRLSKSQRKTLAVVFIDLTKAFDTVSHKHIAEVLERRGVDELIRGLIQDSYRNCYTKVKTAHGDTRKIKIRVGVKQGDPMSPLLFNLALDPLLHMLERLGTGFSVEGTTITSLAFADDLVILSDSWGGMARNLEILDRFSNLTGLTTNPAKCHGFLIGINGPKRYTVNDCDAWSLAGIPIHMVGEQESAKYLGVQINPCKGILKPLLRETIKDLTGKISKALLKPSQKVELLRTYAIPRVVYVADHGSASQTLLDECDRDIRTQVKKWLHLEPFTTDGVLYSRCADGGLGIIKMAAHIPAIQLKRMMSLYDSTDECTKTISRASLPISRVWQLWRQVLREGDRPEKTSRPDLGQIDTSRANTSAWRATAFDKWSKLVSQGVGTVVFKDDRLSNSWTRDPEKHRLKQSELIMALQLRTNTLPTLSLLSKGRGPQESQQCRLCQQEKETAQHIIGNCVELKGNRMASHNKICEFLKKEGEDLGWHVMREKRLKSGDGITGVPDLIMIRDHIALILDVTICFEKSVGTLSDADSKKVGKYEKFREAVKHLNPEIQTVLVAGFPLGARGKWHQGNFRVLDAMGMRKSRARKVATILSKRALLQTIDTCKLFKILAR

SEQ ID NO: 1890 - protein, 1114 aa, unidentified
  source 1..1114: note = uncultivated organism;MG140-192 retrotransposition protein
VAQYEMSHPNERHINQKIRKELFPNRSVESIKSMRREDKYRALLPAKTPEQQKPPNLRKRGRRTPVSPQAGPVLGLDDQGGPALPVLDRANDPPGDPDDGSPSDRESRSSTSSSDSEPGEPPPLRNEQPDLQTDNVGERDDVEYVMRDAGTDPVVGLQEVYVPEREREMEASSLASKARIRDFLNEFRQTQGLDVQVPGSVEEAMTLLRSWLGELPEGQPRENRRARRRLPPDPTATGRQGAPGQQLGRTGRARRGFRGGRGRRRTAVEVPAGRPNNPNPNEPTGEVREAGNPQARTPPDQRRGAPGRAPRDRRANQFRLAQKCYNTSRKDCARRILQGKPFSEVKTSLPPGTAEFWTNLFGTPSAQEGQSASANPAVIHDRIGMPITLEEVMQHALCPGESAAGPDKVTKATLRRLGATKLTFLFNCFLMLGTPGPELAKGRTTLIPKKDEPASPSDYRPITITSHITRGLHKVLAKRIGDAIPVSQRQKGFVQGQNGCAGNSALLHALLAKAKQSRRQVAIVFLDCAKAFDSVSHDAIRKAAAQKGVPPLLVQYISNLYAAASTTVAGAATPNRKGVLQGDPLSSYLFNFVMDLALERLDEALGAIYDRKSRICFMAFADDLVLIGKDPKSLQTLLDQLSDALRPSGLTFGLLKCASLTVKIQPRSRVSYVEDHKYNIGGALLRAMGPTDTYDYLGLSFGFQAGVPDGNDCVRRLQDWASKLRRAPLKPQQKVWILHNVIVGKLRYQLSLSNVTRELIRRADRLLRTILRDIVKLPKDVPSSLLHSPAGNGGLALASFESAIPIAKVSQLREFQASGDPALVWLAANTTFFPGKRVLPRQLELDPPVTVQTLKARAKREVVEHARASIAGIGLQEAGGGNCPSDWVVSGNLVNKGHQYIGAIKTRMGAIPSKARLLRGRPGDRNCKFNCRTAESNNHVLQKCYRSYGGRLERHDKVLSVVSNACSNAGFQVVKEPWIEVGQGRRLCPDLIVYSETERMLWVLDAQVVSDAPSADQEIPQDMRRSHLDACHRLKVDKYAVPGLIQRVRSDYLDVPPKFGSITVNFRGVIAHATVRDLTEILPPPQLKEVLRLISLRALEFSWRMWTRFNGSAG

SEQ ID NO: 1891 - protein, 1071 aa, unidentified
  source 1..1071: note = uncultivated organism;MG140-193 retrotransposition protein
VQQLTSLTGGANKDPRLWEKSPRTQQGKLRHWSLRFDTPTASKTLVTGKSKKEPPPTDLVQSGTGESRKELTCPECLRAFKSKAGLALHRRRAHPVGYHAEIVKAVKAKSKVWSSEELRVISWYEAELLLDPSNSAASGNGLNVQLSRRIQETSGEVLSAEQIKNLRRKPEYKELVTRHKIGLERADGDKITTSNTPNLNDVQMSRIATLVRSMEQGLGREPSSLEEVVPGVWTGQNLEFVDHEYSRFEQRYPAPGFKVQRTPPKFLPARRRARRKALFARVQNLYKSSRPRCAKSVLSGQWSDDQSDKVPPEELHRFWRDIFERPSAIDQRQVEPKRDVQWSLLDPIEVEEVRRCLLGIDGQTAAGPDGRKLSDIKKIPVTELSLLFNKWLYAGVLPTALWEGRTTLIPKEPGTDDPAKFRPIGVSSLLVRIYHRTLARRLDEVCPPSSRQKGFRPGDGIAENTVLLKEILRRTTDQRSLAHLYLVFLDVKKAFDSVSHQSLSLALRRAGVPANLLNYVSGLYDNGWTRTLSGGKLSSKVKPNQGVRQGDPLSSFIFNAVIDWAMEEINHDIGYDFDGDLVPYFAFADDLVILAQSKMGLAEQVSRVVRSLRSSGLEVNSKKCSTMTVVRDGKRKQWAVDKEAYLTINEGLVPALSIEDAYRYLGLKVKASGTVAAVDRRLDEHLENISRAPLKPQQRLWILRTNVYPAMTHQLVLADVTKRLLRNLDVKLRRSVRNWLRLPADTPLGFFHADVKDGGLGLPALRYDIPERITRRMTKLQLSKDPVVARVATSPGHTERLAKWSEPTYLQDKPMSAGKDLRRMSWAELLHGSVDGRGLRDHSCVPYVHSWVTDGSGLSSGHLYNAAVAARGNLLPTRHRGSRGKTRDQQRRTCDACGPSQLETLSHISQVCPRTWGARIKRHNRLLAQLVRMLERRGYTTLAEPKFSSKRGNFKPDVLVWNVGQAAVIDVTVTTDNLPKPDSAHHAKVEKYSVVEEISEFVRKQVGVEPLYTALSINWRGALAPQSAADLRALGLTKRDLRLLSLITVEQTALIHRHFHQSTYRVRLRGQ

SEQ ID NO: 1892 - protein, 1047 aa, unidentified
  source 1..1047: note = uncultivated organism;MG140-194 retrotransposition protein
MQVSGPSYLCWATTPPKVKTIGTKNIRINEDAVAAAAVSSSNLGPSGTVGFTCSDCDRSFTSQRGLSLHRRRQHADTYHREAQPRNLRKPRWDHEEMLLLAKEELRLEVAGWTSSNNINLELHRIHPSRTVEAIKSLRGKKQQYRSLLAELRDRSLDQGDGQVTSGHPSLGLTSESECGWTAKLIEGIDWSLFPNLEPRLLERGMVSHSIHNQLDAAFEEFRCRHSCWHSPPQPPRYATRRPTVLNKQALRRKTYARVQNCFRNNRTRCASDVLSGQWKSEAKQIPLSQVEEFWTEIFSRPSEPDLRQPTPVGPTLWELVEPVSLDELNSILGAMSNKAPGVDGLRLSDLKSMDRTTLLSHFNIWLLTGYQPSGLCLGLTTLIPKDRTDDRPSAMRPITVNSVVVRCFHKLLAARMERLLPLSPRQKAFRAGDGLADNVYTARAILRHSKQHLKPLCLGLIDLRKAFDSVNHTSMLLACQRMGIPPPLIDYINNFYSRSTTQLKNSYERSDHIKVTRGVKQGDPLAVHIFNAVMDWSLAELDPHIGFTLGDQNINHLAFADDVVLFAASPGGLQSNLDALLEHLALSGFAANISKCKTFRIRTDGKAKRWVVDESPFLRVGPDTISALRPTESATYLGIDINARGCRANVEDKLKRGMGQLTSAPLKPQQRLFILRTNLLPSLFHALVLCPASIKYLKYLDGCVRKAVRAWLRLPNDTPYGYFHAASSDGGLGIPSLCHRIPLMKIRRLDRLEQTTDPVIAAVLELDEVRHEKQSVSRGVFLDGIQIQSKDVLKRSLAARLHGAVDGRGLRPSGEVRQQHTWVSSGTRLLTGRNYIGAIKIRGGLMPSLVRRSRGRPRTDVSCDACGRPSSLGHILQVCPRTHKGRLDRHDKIARIVTRIAVRSGKEVLWEPIIKTSSATQVCKPDLVIIDKTSSNAIIMDVTIVADNGDLDSEHNLKIKKYSSEDIHKWVRDRTQVRSVSNSAVAMNWRGLLALRSAQAILDLGGTSRDLSLLSAACCEGGYHCWILYNRSAYRAGKRQRSLRCAQ

SEQ ID NO: 1893 - protein, 1212 aa, unidentified
  source 1..1212: note = uncultivated organism;MG140-195 retrotransposition protein
MNDPTFERTAAIATVADVVAIPGVSFPWPCPDCDRSFAKKAGLSQHRRNAHLQEYLRDCKAEHKPTRVWSDEELRSLAQLVVQIPNRDEKSDRDLAALVYARHQQIGFNRSEEAVRARLRNPLFRQRVATLEPEGERLPEPPGVTPVTAADGGQPPEAVEGRTEPEGRDGASQGAGLSTEGDSEPLGNVDENLVQWRRCFSQWFENTVECQDGIVPALIGSDSQGLNPDRLHLLPTEQLEELYEDWLARFLAGHDRSPAAEIGSEREEGTHNARPAERPIRSGMRTQKGRIEAGTTGLETRRRHEGTRGNQREDVVQPGKRRLKQGWRAWIRRKWDQHPERTAKAVLAGDLTFEEFRELESGGPRRNGVAVPPDELYEFWGRVFGGEPGGREPANTGVPEPVDPRIAQEQHGGRAAQIGNSAELLVGREDPASRMRPLRRGEPVNAGEPRLAQESRAVSIDLMGEDSAPDAEVPEPRVESYWECAMPIRGDEVITALRNLKDGAPGKDGMRKRTLFKIGSRALNWWFNVFLMRGWVPARFKEGVTTLIPKVKTPGGPGQYRPITMSPMMLRCFHTVLAQRMGRLVPVSEQQKGFVPEDGTAYNVLLLRSIIAQRIGERKPLQLAFLDIRKAFDSVEHAALLRACGRAGIPPPLMRYLRFVHKDNSTSLKQAFPTRRLAVRKGVRQGDPLSTHLFNYVMDAACEKLPGEIGLQIGEKLMNRAMFADDTIIMAETKPGLTRLAEAFSSALATAGMTLNAQKCQTLNISVDGRRKRWYCDLDPFLNVGGEAVPALQVGDAYKYLGLGVRCGSPWMHGKDVIQPLETRLKRLSQSALKPQSKLYALRTVLLPGLYHTLSLTDRCDKTTKRIDKVVRRAVRVWLHLPHDAPTAYFHANIRDGGLGIQSVTALACRLRVERSGRFAASLDPGAQCLLQTDWWRRFQSRAHRSVNIGDIKVMNAGKELIRHTWKECLYKSCDGGGLKHHSEAPKSSKWLSERFSKLSGGEFVSAVLVRANLLATRERSSRGRLPLGDPARRCPGCPDKLATLAHMLQVCHRTHLYRIRRHNDLCSMLVAALERRGFRVLREPQIPSGSTFLKPDIIAVSKDEVWVLDPTVVADNADLGEVENAKFLKYGQEAVKEFALQQWSVLLGIDRGEPRFALSGVAVTWRGVWGGATWHALTVRLKIPVSWVQLMSVRVLTSGRKMWLTQKNRTG

SEQ ID NO: 1894 - protein, 1121 aa, synthetic construct
  source 1..1121: note = MG140-196 retrotransposition protein ancestor
MLEHSPAAANRGASDGPVVLRYPFNTTNGPTTGEEPCGLAECPVCTAAFVDHKKLVKHLRRKHGATRQEIQWRCRKCHRTWPKIRSVASHHRHCKARTAPAPGAESQPATQCDEDGCGRSFSTTAGLQLHRRRAHPEAYNEPAPTGKRNAWSDEELRRLARAELDFPGGTSRHINQFLAERFPNRTVDQIRSIRGKTKRYREILEQVRQERTVESDEPEEPPSPPPDPDGSTALSQLKELLRELNSVDDSELARAVEYVRRALEGGDPNTGFDELLDKIFSPKKDPRPKRRPRQRPPPNNRKQRKRAEYKRLQRLFRKDRKRLVQQILDGMPAQATLPPVEDVEEVYRERFGRPSPPDSAPFEPTPCADPEAMLGPITVEEVRKALKSMKRNSAPGPDGHVTMKTLKSLPPPVLQLIFNCWLLMGRVPQALKECRTILIPKSADGLDDVNNWRPITIGSLLLRLYAKILAKRLRKAVNLHPRQKAFVPVDGCGENIAILSSVIRHARKRRKELNIVFLDLAKAFDTVSHESILRALRRFGVPEHFKDIIQDLYDGATTTIRTGDGETEPIPIRRGVKQGCPLSPLLFNMVMDELLRNIGSTEYGFELGDEKISVLAFADDIVLVSGSREGMERMLDICEEFFDARGLKLNARKSHSLSIVPAPKRKTMKVVDGPQWKVGNGSDGEPIPSIKADEVVKYLGVQFSPSGRPKVQLDKLKDWLQRIKKARLKPQQKIDMLRTYILPRLMYQLTLSEVNKSTLRRLDRKIRKTVKKFLHLPPGTPTDFFHLPTREGGLGLPELTETVPARRLKLITRMRSSEDPVVRAVAKQSHWQKRKERCMRWVRAVGTQSASEVKTLKRSLQKERLERFTNELSTQGRGHKSLANSPAKNPWLHNGKSGLSGSEYINACKLLSNTLPTRVNLHRGRPDANKRCRRCHKTAETQAHVLSSCPATKGAITKRHNRVCDLIAKALKKKGWTVLREPRFRVPNGERLRPDLVVIKDDKVYVVDVTVPYENSGEDQRYQRYREKVDKYEPLVPQIKRKFGAENVEVLAIVVGARGTWCQGNNETLKKLGLSKKAIRRNLSMTALRGTLKIWGVFNRTEGRYERANPGQRPDSGTPVP

SEQ ID NO: 1895 - protein, 1121 aa, synthetic construct
  source 1..1121: note = MG140-197 retrotransposition protein ancestor
MLEHSPAAASSGASDGPVVLRYPFNTTNGPTTGEEPCGLAECPACSAAFVDHKKLVKHLRRKHRATREEIQWRCRHCHRTWPKIRSVASHHRHCKVRTAPAPGAESQPAVQCDQDGCGRSFSTTAGLSLHRRRAHPAAYNEPAPTGKRNVWSDEELRKLARMELDLPGGTSARINQFLAERFPNRTVDQIRSIRGRTKRYREILEQLRQERTVESNEPEAPPSPPPDPDGSTALSQLKELLRELNSVDDAELAAAVEYVRRALESNDPNTGFDELLDKIFPPKEDPRPKRRPRQRPPPNNRKQRKRAEYKRLQRLFRKDRKRLVQQILDGMPATATLPPVEDVEEVYRERFGRPSPPDAEPFEPKPCADPEGMVSPITVEEVRKALKSMKRNSAPGPDGHVTMKRLRSLPLPVLQLIFNCWLLMGRVPQSLKECRTTLIPKSADGLDDVNNWRPITIGSLLLRLYAKILAKRLRKAVNLHPRQKAFMPVDGCGENIAILSSVIRQARKRRKELNIVFLDLAKAFDTVSHDSILRALNRFGVPEHFKDVIQDLYDGATTVIRTGEGDTKPIPIRRGVKQGCPLSPILFNMVMDELLRNLPSTEYGFELGDEKIAVLAFADDIVLVSGSREGMERMLDLCEEFFEARGLKLNARKSLSLSIVPAPKRKTMKVDTGPQWKVGNGSDGVPIPMIKADDVVKYLGVQFSPRGRQKVQLDKLKDWLERVKKARLKPQQKLVMLRTYILPRLMYRLTLSETNKTTLRRLDRKIRKTVKKFLHLPPGTPTDFFHLPTKEGGLGLPELAETVPARKLKLITRMRSSEDPVVRAVAEQPHWQKQKERCMRWLRVPAIQSPSEIKTLRRSLHKERLERFTNELATQGRGHKSLANNPAKNDWLHGGKSGLRASEFINACKLLSNTLPTRVNLHRGRPDADKRCRRCHKTAETQKHVLSSCPATKGAITARHNRVCDLIAKALKEKGWTVIREPRIRVPSGERLRPDLVVIKDDKVYVVDVQVPYENGGEDQRYERYREKVDKYEPLVPQIKRKFGAENAEVLAIVVGARGTWCQGNNETLKKLGLSRKAIKRNLSMTALRGTLKIWGVFNRTKGRYERANPGQRPSSGTPVP

SEQ ID NO: 1896 - protein, 1121 aa, synthetic construct
  source 1..1121: note = MG140-198 retrotransposition protein ancestor
MLEHSTAAASSGASTGPVVIRYPVNTTNGGTTGEQACGFAECPNCALAFVDHKSLVKHLRRAHRATREEIQYVCRHCHRQWPKIESVASHHRYCKRKTAVAPDADSRLPVQCEVDGCGRSFTTTAGLRLHKKRAHPAAYNAPMPTGKRNLWSEEELRMLARMELDNPGGTNARINQLLHSRHPNRTVDAIRSIRGRTKRYREILEQLRQEGTPESNDPEAAPSPPPEPDGSISESQLEELLKELSQLDDAELAAAVEYVRRALESNDPGSGFDDLLGKLFPPKEGPRRKRRPRQRPPPKNRKQRKRAEYRRLQRLWRKDRSRLAQVILDGMPATAKEPPIGDVEEVYTERFERPSPEDAEPFEPKPCEDPQGMVNFITVEEVRKNLKSMKRNSAPGLDSNITMKRLRSLPLPCLQLIFNCWLALGKVPQSLKECRTKLLPKSAEGLDDVNNWRPITIGSLLLRLYAKILAKRLQKKVHLHPRQKAFQPLDGCGENIAILSSIIRDARKRRKELNIVFLDIAKAFDTVSHHSIQRALNRFGVPRHFKNVIEDLYDGATTVIRTGEGDTKPIPIRSGVKQGCPLSPILFNMVMDELLRDLPSTEWGYELGDEKVAVLAFADDIVLVSGSRAGMSRMLDYAAGFFEARNLQLNARKSLGLSIVKAPKRKTMKIETGPLWSVGNGSDGVPIPMLSADDMVRYLGVQFSPRGRQKVDLSELKGWLERVKKSRLKPQQKLVMLRTYILPRVLYRLTIGEANKTTLRRVDREIRKTVKKFLHLPVGTATDFFHLSTKEGGLGLPPLAETVPKRKLKLATRLQSSEDPIIRAVAESPHWRKQTDRCLRWIRVPAINRPSDINRRARELHNDRLERFTNELATQGRCHRSLANNPLKNDWLHGHRSGLRASEFIDACKLLTSQLPTRAALHRGRPEADKRCRGCGKSAETQKHVLSSCPLTKQATTARHNRVADLIARYLKEKGWNVIREPRIRNPSGELMRPDLVVIKDDNVAVVDVQVPYEDGGHDQLAERYREKCKKYRPLTPTIRHVFGATNATIGAIVVGARGTWCQGNNPILNHLGVNRKAIKRNLSMTALRGTLKIWGAFKNTVGRYERAHPSQRPSSGPPVP

SEQ ID NO: 1897 - protein, 1121 aa, synthetic construct
  source 1..1121: note = MG140-199 retrotransposition protein ancestor
MDKGSAAAPSSGASDGPHVIRYPFNTTNGGTTGEEPCSLSECPNCGEAFVSHKSLVKHLRRAHGPTREEIQYRCRKCHREYPNLRSVASHHRHCKRKTATASEGSASLPTACEVPHCGRSFSTKAGLSLHRRRAHPEEYNEPTPTGKRRRWSDEELRMLARMELDLPGLSSRHINQLLAERFPNRTVEAIRSMRGRTPKYREILEELREEGAPEEDPSEAGSTAEPEPGGSISKPELRELLKELTTVDDAHVQAALEYTRRVLESDDVDEGFDDFIEQLFPPRKRRRPKRRPRERPPPNNRRQRRRAEYKRVQRLFRKDRKRLVNQILDGAPTTATLPPVEDVEEVYRDRFSTPSPPDSAPFTSKPCNDPSGLVGPITVEEVRKALKSMKRNSAPGPDGQITMKRLRSLPPKVLAAIFNVWLLMGRVPESLKECRTTLIPKSGDNLDDVNNWRPITIGSLLLRLYAKILARRLQKKVNLHPRQKAFMPVDGCGENIAILSSIIRHARKRRKELYIVFLDLAKAFDTVSHDSIQRALRRFGVPEHFVDVIQDLYDGATTVISCGDGDTKPIPIRRGVKQGCPLSPILFNMVMDELLSSLGDTEYGFELGDEKVSALAFADDIVLISDSRAGMSRLLDQCEEFFDARGLKLNAKKCASLSLAPAPKRKTMKIATEPIWRINNPSDGEPIPMIGPDDTVKYLGVQFSPSGKPKVQLDKLKDWLERIKKARLKPQQKLVMLRTYILPRLLYRLTLGEVNKNTLRRLDRLIRKTVKKFLHLPSGTPTSFFHLPVKDGGLGLPSLVETVPMAKLKLINRLQSSDDPVVRAVAESEHWRKELRRCRRWLGIPAVPRPSDINSAKKELHKERRERFTNWLTTQGRGHEQLANNPAKNDWLHGHNSSLRAREFINACKLLSNTLPTRVNLHRGRPDADKRCRRCGQTPETQKHVLQSCPATKRAITKRHNRVCDKIAKALREKGWTVIREPRIRTPSGELLKPDLVVVKDDRVYVVDVQVPYENSAHDYLAERYREKVDKYEPLTEQVKRRYGAKDAEVGAIVIGARGTWCPRNNKVLKKLGGLTKSIRRNLSMTALRGSLRIWRCFNGTRSRSRRTHPEKVPNRGPPAP

SEQ ID NO: 1898 - protein, 1121 aa, synthetic construct
  source 1..1121: note = MG140-200 retrotransposition protein ancestor
MTKGSAAAASSGASTGPHVIRYPFNTTNGGTTGEQPCFFAECPNCGEAFVDNKSLVKHLRRAHKATRDQIQYVCRHCHRQFPKLESVSSHHRYCKRKTATAPDGGAGLPVECEVDGCGRSFTTTAGLRLHRRRAHPTEYNAPIPTGKRRLWSEEELRMLARMELDNPGLSNARINQLLHSRHPNRTVDAIRSMRGRTPRYREIMEELREEGAPEDNPSEAGSTAEPEPEGSISECQLRELLKELSQLDDAQVQASIEYTRRVLESDDPGEGFDDFLEKLFPPKEGRRPKRRPRERPPPKNRKQRRRAEYRRLQRLWRKDRSRLAQVILDGMPTTAKEPPIGDVEEVYTDRFERPSPEDTAPFTSKPCDDPQGLVDFITVEEVRKNLKSMKRNSAPGLDSNITMKRLRSLPLPCLAAIFNVWLLLGRVPQSLKQCRTKLLPKSAEGLDDVNNWRPITIGSLLLRLYAKILARRLQKKVNLHPRQKAFQPVDGCGENIAILNSIIRDARKRRKELYIVFLDIAKAFDTVSHDSIQRALNRFGVPEHFRDVIEDLYDGATTVIQTGEGDTKPIPIRSGVKQGCPLSPILFNMVMDELLSSLGDTEWGYELGDEKVAALAFADDIVLVSGSRAGMSRLLDQAAGFFEARNLQLNAKKCLGLSLKPAPKRKTMKIETGPIWSVNNGSDGVPIPMLGPDDTVRYLGVQFSPSGKKKVDLAELKDWLERIKKSRLKPQQKLVMLRTYILPRVLYRLTIGEANKTTLRRVDRLIRKTVKKFLHLPVGTATSFFHLPVKDGGLGLPSLLETVPKAKLKLAYRLQSSDDPVIRAVAESDHWRKELRRCRRWLGIPAVDRPSDINKRKRELHKERRERFTNELTTQGRCHQQLANNPLRNDWLHGHNSSLRANEFIDACKLLTSQLPTRAALHRGRPEADKRCRGCGKSPETQKHVLQSCPLTKQARTARHNRVADLIAKYLKEKGWNVIREPRIRTPSGELLKPDLVVVKDDNVAVVDVQVPYEDSAHDQLAERYREKCDKYEPLTETIKHLFGAKNATIGAIVVGARGTWCPANNRILNHLGANTKAIKKNLSMTALRGSLKIWRAFKNTVSRSKRAHPSKVPSSGPPVP

SEQ ID NO: 1899 - protein, 1121 aa, synthetic construct
  source 1..1121: note = MG140-201 retrotransposition protein ancestor
MLEDSPAAANRGASDGPVVLLYPFNTTNGPTTGEEPCGLWECPVCSAAFASPKELVKHLRRKHGATKKEVTWRCSKCHRTWPNIRSVASHYRHCKARTAPAPPAESQPANQCDEDGCGRSFSTQAGLSLHRRRKHPEAYNEPAETGKRNAWTDEELRRLAKAELEFPGGSSRNINQQLAEHFPNRTVDQIRKIRGKTKRYREILQQARQERAVESEEEDEEPSPPPDPDGSTALSQLKKLLRELDSVDDSELARAVAYVRRTLEGGDPNEGFDELVDKIFSQKREPRPKRRRRRRPRPNNRKQRKRQKYKRVQRLFRKDRKRLVQQILDGTPAQATLPAVEDVEEVYRERFGTPSPPDSAPFEPTPGADDSAMLGPITVEEVREALKSMKRDSAPGPDGHVTMKTLKSLPPPVLALIFNVWLVSGRVPEALKECRTILIPKSGDGAEDVNNWRPITIGSLLLRLYAKILAKRLRKAVNLNPRQKAFVPVDGCFENIAILQSVIRHARKRRKELHIVFLDLAKAFDTVSHESILRALRRFGVPEHFVDIIQDLYDGATTTIRTGDGETEPIPIRRGVKQGCPLSPLLFNMVMDELLRKIEQSDHGFELGDEKISVLAFADDLVLLSDSREGMQRMLDICEEFFDARGLKVNAKKCHSLSIVPARKRKTMKVVDGPQWKVGNGSDGEPIPSVKADDVVKYLGVQISPSGRVKVQLDKLKDWLQRIKKAPLKPQQKIDMLRTYILPRLMYQLRLSEVNKSTLKRLDRLIRKTVKKFLHLPPGTPTSFLYMSTREGGLGLPELTETVPAARLKAITRMASSEDPVVRAVARQTHWQERTERCLRWVRAVGTQSATEVKTLKKSLQKRRLERFTNELPTQGKGLKSMANSPAKNSWLRNGKSGLSGREYVTACKMLSNTLPTRVNLHRGRPDANKRCRRCGKTAETQAHVLSGCPATKGAITKRHNRVCDMIAKELKKKGWTVLREPTFRVPNGERLRPDLVVIKDNKVYVVDVTVPYENSAEDQRHQRYREKVEKYEPLVPQIKKQFGAKNVEVLAIVVGARGTIAKGTNETLKKLGLSKKGIARSLSMTALRGSLKIWHVFNRTEGRPERANEGQRPDSGSPVP

SEQ ID NO: 1900 - protein, 1121 aa, synthetic construct
  source 1..1121: note = MG140-202 retrotransposition protein ancestor
MLEHSPAAANRGASDGPVVLLYPFNTTNGPTTGEEPCGLAECPVCSAAFVSPKKLVKHLRRKHGATRQEIQWRCRKCHRTWPNIRSVASHYRHCKARTAPAPGAESQPANQCDEDGCGRSFSTTAGLQLHRRRKHPEAYNEPAPTGKRNAWSDEELRRLARAELDFPGGSSRNINQQLAEHFPNRTVDQIRSIRGKTKRYREILQQVRQERAVESETPDEAPSPPPDPDGSTALSQLKKLLRELNSVDDSELARAVAYVRRTLEGGDPNSGFDELVDKIFSPKRDPRSKRRRRRRPPPNNRKQRKRQEYKRLQRLFRKDRKRLVQQILDGTPAQATLPPVEDVEEVYRERFGSPSPPDSAPFEPTPCADDEAMLGPITVEEVREALKSMKRDSAPGPDGHVTMKTLKSLPPPVLQLIFNVWLVLGRVPEALKECRTILIPKSGDGAEDVNNWRPITIGSLLLRLYAKILAKRLRKAVNLNPRQKAFVPVDGCGENIAILSSVIRHARKRRKELHIVFLDLAKAFDTVSHESILRALRRFGVPEHFVDIIQDLYDGATTTIRTGDGETEPIPIRRGVKQGCPLSPLLFNMVMDELLRNIGTTEHGFELGDEKISVLAFADDLVLLSGSREGMERMLDICEEFFDARGLKVNAKKSHSLSIVPAPKRKTMKVVDGPQWKVGNGSDGEPIPSIKADEVVKYLGVQFSPSGRPKVQLDKLKDWLQRIKKAPLKPQQKIDMLRTYILPRLMYQLRLSKVNKSTLKRLDRKIRKTVKKFLHLPPGTPTDFFYMPTREGGLGLPELTETVPAARLKLITRMRSSEDPVVRAVAKQSHWQEREERCLRWVRAVGTQSATEVKTLKKSLQKRRLERFTNELSTQGRGHKSMANSPAKNSWLRNGKSGLSGREYVTACKMLSNTLPTRVNLHRGRPDANKRCRRCHKTAETQAHVLSSCPATKGAITKRHNRVCDMIAKALKKKGWTVLREPRFRVPNGERLRPDLVVIKDDKVYVVDVTVPYENSAEDQRYQRYREKVDKYEPLVPQIKRKFGAENVEVLAIVVGARGTLCQGTNETLKKLGLSKKAIARSLSMTALRGSLKIWGVFNRTEGRYERANEGQRPDSGTPVP

SEQ ID NO: 1901 - protein, 1121 aa, synthetic construct
  source 1..1121: note = MG140-203 retrotransposition protein ancestor
MDEGSANAPSGSASDGPHVLTYPFNTTNGGTTGEEPCSVSKCPGCGEAFTSTKSLKKHLRKAHGPTREKIQYRCRKCNREYPNIRSVASHYRSCKGRTPSAGSGSASAPTACEVPHCGRSFSTKRGLSQHRRRAHPEEYNEPTPTGKRRRWSDEELRMLARMEADLPGKSTRHINQLLAERFPNRTVEAIRGQRNRTPKYRELLQELREEAAPAEDPSESGSPSDPEPGGSVPSPSLREALKELTEEDDVHVRSALEYTDKVLESDDVDEAFDDFIEQLYPPRRRRRPKRRPRKRPSPNNRRQRRRQQYARVQRLFRKNRKRLVKQILDGAPTSSTLPPVEDVEEVYRDRFSTPSPPDSAPFESKPSNDDSELLGPITAEEVKKALKSMKRNSAPGPDGEITMKTLKKLPPKVLAAIFNVWLLTGRVPESLKECRTVLIPKSGDPLDDVNNWRPITIGSLLLRLYAKILARRLSKAVNLNPRQKAFVPVDGCGENVAILDSIIRHARRRRKELYIVFLDLAKAFDTVSHDSIMRALRRFGVPEHFVDLIRDLYDGATTTISCGDGETEPIPIRRGVKQGCPLSPILFNMVMDELLSSIGDTEYGFKLGDERISALAFADDLVLISDSRAGMQRLLDQCEEFFDARGLKINAKKCASLSLKPAGKRKTMKVDTEPTFRINNPSTGEPIPAVGPDDTVKYLGVQFGPSGKPKAQVDKLKDWLERLKKARLKPQQKIHILRTYIIPRLMYQLTLGKVNKNTLKRLDRLIRKAVKKWLHLPSSTPTSFFHLPVRDGGLGIPSLRETVPVARLRLLTRLASSDDPVVRAVAKSEHWRKELRRCSRALGIGGTPEASDINSLKKELRKQRRERFTNWLTTQGRGHEQFANSPASNSWLHNGTSTLSGREFINAIKLLSNTLPTRVTLSRGRPDADKRCRRCGQTPETLSHILQSCPATKGMRTKRHNRVCDKIAKKLRKKGWTVIREPRIRTPNGELLKPDLVVVKDDRVFVVDVTVPYENSAHDYLEERYREKVDKYEPLTEQVKKRYGAKDVEVLGIVIGARGAWCPANNKVLKKLGGLSKSTRRTLSMTALRGSLRIWRCFNQTRSRSRRGRPGGVPNRGAGAP

SEQ ID NO: 1902 - protein, 1121 aa, synthetic construct
  source 1..1121: note = MG140-204 retrotransposition protein ancestor
MDKGSASAPSGSASDGPHVLTYPFNTTNGGTTGEEPCSLSKCPGCGEAFTSTKSLVKHLRRAHGPTREEIQYRCRKCHREYPNIRSVASHYRHCKGRTASAGSGSASAPTACEVPHCGRSFSTKAGLSLHRRRAHPEEYNEPTPTGKRRRWSDEELRMLARMELDLPGKSSRHINQLLAERFPNRTIEAIRSMRNRTPKYRELLQELREEAAPEEDPSEAGSTSDPEPGGSIPSPELREALKELTEEDDVHVRSALEYTEKVLESDDVDEAFDDFIEQLFPPRRRRRPKRRPRKRPPPNNRRQRRRQQYKRVQRLFRKDRKRLVKQILDGAPTSSTLPPVEDVEEVYRDRFSTPSPPDSAPFTSKPSNDDSALLGPITVEEVKKALKSMKRNSAPGPDGEITMKTLKSLPPKVLAAIFNVWLLMGRVPESLKECRTVLIPKSGDPLDDVNNWRPITIGSLLLRLYAKILARRLSKAVNLNPRQKAFVPVDGCGENVAILDSIIRHARKRRKELYIVFLDLAKAFDTVSHDSIMRALRRFGVPEHFVDIIRDLYDGATTTISCGDGETEPIPIRRGVKQGCPLSPILFNMVMDELLSSIGDTEYGFELGDERISALAFADDLVLISDSRAGMERLLDQCEEFFDARGLKLNAKKCASLSLAPAPKRKTMKVATEPTFRINNPSTGEPIPAVGPDDTVKYLGVQFSPSGKPKVQVDKLKDWLERLKKARLKPQQKIHMLRTYIIPRLMYQLTLGKVNKNTLKRLDRLIRKTVKKFLHLPPGTPTSFFHLPVKDGGLGLPSLRETVPVARLKLITRLASSDDPVVRAVAKSDHWRKELRRCRRALGIGGTPRASDINSLKKELQKQRRERFTNWLTTQGRGHEQFANSPAKNSWLHNGNSTLSGREFINACKLLSNTLPTRVNLHRGRPDADKRCRRCGQTPETQAHVLQSCPATKGAITKRHNRVCDKIAKALRKKGWTVIREPRIRTPNGELLKPDLVVVKDDRVYVVDVTVPYENSAHDYLEERYREKVDKYEPLTEQVKKRYGAKDVEVLGIVIGARGTWCPRNNKVLKKLGGLSKSTRRTLSMTALRGSLRIWRCFNGTRSRSRRGRPGKVPNRGASAP

SEQ ID NO: 1903 - protein, 1036 aa, synthetic construct
  source 1..1036: note = MG140-205 retrotransposition protein ancestor
MSGLCSASDLTVGTKNASANHCKWEDAAPTAPASESSGEFTCPDCGRAFKSQRGLSLHRRRKHPEVYHAENQPKARTKARWDHEELVLLAREEIRLQGCGGPRNINQELAKRFPNRTLEAIKGLRNKKPRYKELLAELRSESADQPVPSGSPSEGSDASEGVDHDWREKLREAIDASGFDSLDLDLLAPGCPSEEVREKIDEEFEEWVKSLTCRHRPPPRPRRGRNGVPRPPRPTNKRARRRAQYARVQRLYKKNRSRCAQSVLSGSWECDKPAPDLPLEEMEPFWRPIFETPSVPDSRSPEPVGPVQWDLVEPITPDELEKVLKGMKDGAPGPDGIKLKDLKKLDAEELAAHFNLWLLAGYQPTALCQGVTVLIPKDPGTTDPAKHRPITISSIIVRCFHKIMARRMEKHLPLSPRQKAFRAGDGIAENVWTLQAIIQHAKRKCKPLNVVFLDVRKAFDSVSHESILLAAKRMGVPPPLLSYIRELYSRSTTRLRVGGERSDPIRVRRGVKQGDPLSPHLFNAVIDWALSSLDPNIGISLGDVRINHLAFADDIALLASTPAGLQSQIDRLEEHLAKCGLTISAGPTGKSASLRIAVDGKAKRWVVNPNPFLRVGGEVIPALSISETYKYLGIQISARGKKCRANVAEKLQKGLDNLTRAPLKPQQRLYILRNHLLPSLYHQLVLSPCSKGYLNWLDRTVRAAVRSWLKLPKDTPTAFIHAEVADGGLGIPSLRHTIPLMRTKRLERLASSNDPVVAAVAKTPFFRKELRSWSRPTLGGRPITDKESLKQALAAALHRSVDGRGLRHSSQVPHAHKWVSSPTNLMSGRNYIGAIKVRGGLMHTAVRAARGRPERDVRCDCCGRPESLGHILQVCPRTSGARIKRHDRIVQLVAKAARRKGWTVLVEPAIVPTPAGIRKPDLVVWKDGSAYVIDVTVVSDNADLDKAHHRKVEYYNTPEIRDWVRNRTGAGEVKFSAVALNWRGVLSPQSADLLKNSLGLSKYDLSLLSVVVCEKGYRIWRHFKRSTYRVRRRNRG

SEQ ID NO: 1904 - protein, 1035 aa, synthetic construct
  source 1..1035: note = MG140-206 retrotransposition protein ancestor
MFACSECDGTFGNKGALGNHCKWKHAQTRLPERRAGGEFACPDCDNAYDSSGGLNVHRRAKHPDVYHAARQPAARVKARWSYEEMVLVARAELEIRGTNPPRGVVRVLHSRFPDRTFEAIKCLRNKNPRYKEVLAALEAEGVDEGPPTVTPSEQTHASAQADGLWRDQLRMAIDIGHVGVDDLDWVADGCPAEDIRNKLDELFASWVGHLVRGERAPARSHQPAAGVRNPGRELDPRRRRRAQYSAIQHLYGRKPSAAAHKVLDGSWECDDPVPTPTLEEFRMAWQPIFETPSIKDNRRPTCVGQVRWEIVSPVTPDELNKVLTEGASSAPGPDGVKLKDVIGLGTGELCSHFNLWLLCGSQPSALCVGRTIYIPKGSESNDALKYRPITIASHILRVFHKIMARRFDAFLPLKYTQKGFRSGDGIAQHVLSLQAIIDGAKRRCKPVNLVFLDVRKAFDSVSHDTIVLAMRRLGCPDPFLSYIRDLYSRSSTVIEHNGERSAPIFTRRGVKQGDPLSPFMFNAVIDWAFSSLDDHIGFSFGHVRVNNLGYADDVALLSDTQAGLRSQLGQFESHLAKGGLTISAGTEGKSASLSIAVDGKAKRWVVDQTPFLATNADIIPALSASGEYRYLGIMLGSGGAKVRSSLREELLQGLRNITRAPLKPHQRLRILRNFLLPKYLHELVLAPVADGWLNWLDTAIRANVRQWLKLPQDTPVAFIHAGTGDGGLSVPSLRYSVPVMRRKRLEAVHSATDPISTALAASPFFQKELSGLSRKTLGGRLVTDKQSLAQAWAACLHTKVDGRGLSEARSCTEGSRWVSNPPRNQSGANYIGAIKARGGLLCSKVRSARGDSGRDVRCDSCMRPETAQHIIQVCPRTSGPRMRRHDRVVQFVSAAAERAGYKVLVEPRIVGRTLGVRKPDLVLWNESKAYVADVTVTSDQVGGVKAHRDKVAYYDQPEIREWVEKYTGRSDISFSAVAANWRGVLSPLSADFLKSVLKLSNWDISLLGLRICEETYHIHRYFGRSTYRIRGRGAS

SEQ ID NO: 1905 - protein, 1036 aa, synthetic construct
  source 1..1036: note = MG140-207 retrotransposition protein ancestor
MSGLCSASNLTVGTKNASANHCKGEDAAPTAPASESSGEFTCPDCGRAFKSQRGLSLHRRRAHPEVYHAENQPRARTKARWDHEELVLLAREEIRLQGCGGPRNINQELAKRFPNRTLEAIKGMRNKKPRYKELLAELRSESGDQPVPSGPPSPGSDASEGVDHDWREKLREAIDGSGFDSLDLDLLEPGCPSEEVREKIDEEFEEWVKSLTCRHRPPPRPRRGRNPRPRPPRPTNKRARRRAQYARVQRLYKKNRSRCAQSVLSGSWECGKEAPDLPLEEMEPFWRPIFETPSVPDSRSPEPVGPTQWDLVEPITPDEVERVLKGMKDGAPGPDGIKLKDLKKLDAEELAAHFNLWLLAGYQPSALCQGVTVLIPKDPGTTDPAKHRPITISSIVVRCFHKILARRMEKHLPLSPRQKAFRAGDGIAENVWTLQAILQHAKRKLKPLCVAFLDVRKAFDSVSHESILLAAKRMGVPPPLLSYIRELYSRSTTRLRVGGELSDPIRVNRGVRQGDPLSPHLFNAVIDWALSSLDPNIGISLGDVRINHLAFADDIVLLASTPAGLQSQVDRLEEHLAKCGLSISAGPNGKSATLRIAVDGKAKRWVVNPNPFLRVGGEVIPALSISETYKYLGINISARGKKCRANVAEKLERGLSNLTRAPLKPQQRLYILRTHLLPSLYHQLVLSPCSKGYLKWLDRTVRAAVRSWLKLPKDTPTAFFHAEVADGGLGIPSLRHTIPLMRTKRLDRLASSSDPVIAAVLKTPSFRKEMRSWSRPTLGGRPITDKESLKQALASALHRSVDGRGLRHSSEVPHAHKWVSSGTNLMSGRNYIGAIKIRGGLMHTAVRAARGRPERDVRCDCCGRPESLGHILQVCPRTHGARIKRHDRIVQLVAKAARRKGWTVLVEPAIVPTPAGIRKPDLVVYKDGSAYVIDVTVVADNADLDEAHHRKVDYYNTPEIRDWVRNRTGAGEVKFSAVALNWRGVLSPRSARLLKNSLGLSKSDLSLLSVVVCEKGYRIWRHFKRSTYRVRRRNRG

SEQ ID NO: 1906 - protein, 1036 aa, synthetic construct
  source 1..1036: note = MG140-208 retrotransposition protein ancestor
MSGLCSASGFTVGTKNASANHCKGEDAAPTAPASGSSGEFTCPDCGRAFKSQRGLSLHRRRAHPEEYHAENQPRARTKARWDHEELVLLAREEIRLQGCGGRRNINQELAKCFPNRTLEAIKGMRNKKPRYKELLAELRSESGSQPTPSGPPSPGSDASEGVDHDWREKLREALQGSGFDSLDLDDLVPGCPSEEVRELIDEEYEEWVKSLASRHRPPPRPRRGRNPRPRPPRPTNKRARRRAQYARVQRLYKKNRSRCAKSVLSGDWECGKEAPDLPLEEMEPFWRPIFETPSVPDSRSPEPVGPTQWDLVEPITADEVERALKGMKDGAPGPDGIKLKDLKKIPAEELAAHFNLWLLAGYQPSALRQGVTVLIPKTPGTTDPAKHRPITISSIVVRCFHRILARRMEKHLPFSPRQKAFRAGDGIAENVWTLQAILQHAKRKLKPLCVAFLDVRKAFDSVSHESILLAAKRMGVPPPLLSYIRELYSNSTTRLRVGGELSDPIRVNRGVRQGDPLSPHLFNAVIDWALSSLDPNIGISLGDARINHLAFADDIVLLASTPAGLQSQVDRLEEHLGKCGLSISAGPNGKSATLRIAVDGKAKRWVVNPNPFLRVGGELIPALSISETYKYLGINISARGKKTRANVAEKLERGLSHLSRAPLKPQQRLYILRTHLLPSLYHQLVLSPCTKGYLKWLDRTVRAAVRSWLKLPKDTPTAFFHAEVADGGLGIPSLRHTIPLMRTKRLDRLASSSDPVIAAVLKTPSFRKEMRKWSRPTLGGRPITDKESLKQALASALHRSVDGRGLRHSSEVPYAHRWVSSGTNLMSGRNYIGAIQIRGGLLHTAVRAARGRPDADVRCDCCGRPESLGHILQVCPRTHGARIKRHDRIVELLAKAARRKGWTVLVEPAIVPTPAGIRKPDLVVYKDGSAFVIDVTVVADNADLDEAHHRKVDYYNQPEIRDWVRNRTGAGEVKFSAVALNWRGVLSPQSARLLKKSLGLSKSDLSLLSVVVCEQGYRIWRHFKRSTYRVRRRNRG

SEQ ID NO: 1907 - protein, 1036 aa, synthetic construct
  source 1..1036: note = MG140-209 retrotransposition protein ancestor
MAGLCSASGTTVGTKNGSANHCRCEDASATAPASGSSSEFTCPDCGRSFKSQRGLSQHRRRAHPEEYHSEQTPKARTKARWDHEEMYLLAREEVRLQGCGSRRNINQELAKRFPNRTLEAIKGQRNRKPRYKELLQELREQAADQGASGGEPSAGSDSSPAADHDWRESLREALTGASFSSLDLDDIVPGCPSEEVRELIDEEFEEWVEQLYSRHRRPPRKRRGRRPRPRPPRPTNKRQRRRAQYARVQRLYKKNRSRCARTVLSGNWKLGKESPSLPLEEMEPFWRPLFETPSVPDSRSPEPVGPVQWDLVEPITADEVKRALKGMKDGAPGPDGITLKDLKKIPPEELAAHFNLWLLAGYQPSALRQGVTVLIPKVAGTSDPAKYRPITISSIIVRLFHRILARRMERHLPLSPRQKAFRKGDGIAENVFLLQAILQHAKRRLRPLCVAFLDVRKAFDSVSHESILLAAKRMGVPPPLLDYIRNLYSNSTTRLRVGGELSDPIRVNRGVRQGDPLSPHLFNAVIDWALSSLDPNIGVSLGDERINHLAFADDLVLLASTPAGLQRQVDQLEEALGKCGLEINAGPNGKSATLRIKVDGKRKRWVVDPNPFLRVGGELIPALSVSETYKYLGIQISARGRVTRANVAEKLQKGLDNLTRAPLKPQQRLYILRNHLIPSLYHQLVLSRVSKGYLKRLDRTIRAAVRSWLKLPKDTPTAFFHADVADGGLGIPSLRHTIPLMRTKRLERLASSSDPVIRAVAKTPSFRKEMRRWSRPTVGGTPISSKEDLKQALADQLHKSVDGRGLRHASQVPSAHRWVTDGTSLMSGRNYIGAIKVRGGLLHTRARASRGRPDADVRCDCCGRPESLGHILQTCPRTHGARIKRHDRVVELLAKKLRRKGWTVLVEPAIVPTPAGIRKPDLVVWKDGRAFVIDVTVVSDNADLDEAHQRKVDYYNTPEIRDWVRNRTGASEVKFSAVVLNWRGVLSPQSARLLKRSLGLSKSNLSLLSVVVLEQGYRIWRHFKRSTYRVRRRRRG

SEQ ID NO: 1908 - protein, 1036 aa, synthetic construct
  source 1..1036: note = MG140-210 retrotransposition protein ancestor
MAGLCSASGTTVGTKNGSANHCKCEDASATAPASGSSSEFTCPDCGRAFKSQRGLSLHRRRAHPEEYHAENQPKARTKARWDHEEMYLLAREEIRLQGCGSRRNINQELAKRFPNRTLEAIKGQRNKKPRYKELLQELREQASDQGTSGGEPSAGSDSSPAADHDWRSNLREALQGSSFSSLDLDDIVPGCPSEEVRELIDEEFEEWVEQLYSRHRPPPRKRRGRNPRPRPPRPTNKRARRRAQYARVQRLYKKNRSRCAKTVLSGNWKLGKEAPSLPLEEMEPFWRPIFETPSVPDSRSPEPVGPVQWDLVEPITADEVKRALKGMKDGAPGPDGIKLKDLKKIPAEELAAHFNLWLLAGYQPSALRQGVTVLIPKVAGTSDPAKHRPITISSIIVRCFHRILARRMEKHLPLSPRQKAFRAGDGIAENVFLLQAILQHAKRRLKPLNVAFLDVRKAFDSVSHESILLAAKRMGVPPPLLDYIRELYSNSTTRLRVGGELSDPIRVNRGVRQGDPLSPHLFNAVIDWALSSLDPNIGVSLGDARINHLAFADDLVLLASTPAGLQSQVDQLEEHLGKCGLEISAGPNGKSATLRIKVDGKAKRWVVNPNPFLRVGGEVIPALSVSETYKYLGIQISARGRKTRANVAEKLQKGLDNLTRAPLKPQQRLYILRNHLIPSLYHQLVLSPCSKGYLKWLDRTIRAAVRSWLKLPKDTPTAFFHAEVADGGLGIPSLRHTIPLMRTKRLERLASSSDPVIAAVAKTPSFRKEMRRWSRPTVGGVPISSKENLKQALADQLHKSVDGRGLRHASQVPSAHRWVSDGTSLMSGRNYIGAIKVRGGLLHTAARASRGRPDADVRCDCCGRPESLGHILQVCPRTHGARIKRHDRVVELLAKAARRKGWTVLVEPAIVPTPAGIRKPDLVVWKDGRAFVIDVTVVSDNADLDEAHQRKVDYYNTPEIRDWVRNRTGAGEVKFSAVALNWRGVLSPQSARLLKRSLGLSKSNLSLLSVVVLERGYRIWRHFKRSTYRVRRRRRG

SEQ ID NO: 1909 - protein, 1036 aa, synthetic construct
  source 1..1036: note = MG140-211 retrotransposition protein ancestor
MAGLCSASDTTVGTKNASANHCKCEDASATAPASSSSSEFTCPDCGRAFKSQRGLSLHRRRAHPEVYHAENQPKARTKARWDHEEMYLLAREEIRLQGAGSPRNINQELAKRFPNRTLEAIKGQRNKKPRYKELLQELRDEAADQGVSGGEPSAGSDSSPAADHDWRSKLREAIDASSFSSLDLDLIVPGCPSEEVREQIDEEFEEWVEQLVARHRPPPRKRRGRNGRPRPPRPTNKRARRRAQYARVQRLYKKNRSRCAKTVLSGSWELGKEAPSLPLEEMEPFWRPIFETPSVPDSRSPEPVGPVQWDLVEPITADEVKRVLKGMKDGAPGPDGIKLKDLKKLDAEELAAHFNLWLLAGYQPSALCQGVTVLIPKDAGTTDPAKHRPITISSIIVRCFHKILARRMEKHLPLSPRQKAFRAGDGIAENVFLLQAILQHAKRRLKPLNVAFLDVRKAFDSVSHESILLAAKRMGVPPPLLDYIRELYSRSTTRLRVGGELSDPIRVNRGVRQGDPLSPHLFNAVIDWALSSLDPNIGISLGDVRINHLAFADDIVLLASTPAGLQSQVDQLEEHLGKCGLEISAGPTGKSATLRIKVDGKAKRWVVNPNPFLRVGGEVIPALSVSETYKYLGIQISARGRKTRANVAEKLQKGLDNLTRAPLKPQQRLYILRNHLIPSLYHQLVLSPCSKGYLKWLDRTIRAAVRSWLKLPKDTPTAFFHAEVADGGLGIPSLRHTIPLMRTKRLERLASSSDPVIAAVAKTPSFRKEMRSWSRPTLGGVPISSKENLKQALADQLHKSVDGRGLRHASQVPSAHRWVSSGTNLMSGRNYIGAIKVRGGLLPTAARASRGRPDADVRCDCCGRPESLGHILQVCPRTHGARIKRHDRVVELVAKAARRKGWTVLVEPAIVPTPAGIRKPDLVVWKDGRAYVIDVTVVSDNADLDEAHQRKVDYYNTPEIRDWVRNRTGAAEVKFSAVALNWRGVLSPQSARLLKNSLGLSKSDLSLLSVVVLEKGYHIWRHFKRSTYRVRRRRRG

SEQ ID NO: 1910 - protein, 1036 aa, synthetic construct
  source 1..1036: note = MG140-212 retrotransposition protein ancestor
MAGLCSASDTTIGTKNASANHCKCEDASDTAPASESSSEFTCPDCDRAFKSQRGLSLHRRRKHPEVYHAENQPKARTKARWDHEEMVLLAREEIRLQGSGSPRNINQELAKRFPNRTLEAIKGLRNKKPRYKELLQELRDEAADQGVSGGEPSEGSDASPAADHDWRSKLREAIDASSFSSLDLDLIAPGCPSEEVREKIDEEFEEWVEQLVARHRPPPRKRRGRAGVPRPGRPTNKRARRRAQYARVQRLYKKNRSRCAQTVLSGSWELGKPAPSLPLEEMEPFWRPIFETPSVPDSRSPEPVGPVQWDLVEPITADELKRVLKGMKDGAPGPDGIKLKDLKKLDAEELAAHFNLWLLAGYQPSALCQGRTVLIPKDAGSTDPAKHRPITISSIIVRCFHKIMARRMEKHLPLSPRQKAFRAGDGIAENVLLLQAIIKHAKRQCKPLNVVFLDVRKAFDSVSHESILLAAKRMGVPPPLLDYIRELYSRSTTRLRVGGERSEPIRVRRGVKQGDPLSPHLFNAVIDWALSSLDPNIGISLGDVRINHLAFADDIALLASTPAGLQSQIDQLEEHLGKCGLSISAGPTGKSATLRIEVDGKAKRWVVNPNPFLRVGGEVIPALSVSETYKYLGIQISARGRKTRANVAEKLQKGLDNLTRAPLKPQQRLYILRNHLIPSLYHQLVLSPCSKGYLNWLDRTIRAAVRSWLKLPKDTPTAFIHAEVADGGLGIPSLRHTIPLMRTKRLERLASSSDPVIAAVAKTPFFRKEMRSWSRPTLGGVPISSKENLKQALADQLHRSVDGRGLRHASQVPAAHRWVSSPTNLMSGRNYIGAIKVRGGLLPTAARAARGRPDRDVRCDCCGRPESLGHILQVCPRTSGARIKRHDRVVQLVAKAARRKGWTVLVEPAIVPTPAGIRKPDLVVWKDGRAYVIDVTVVSDNADLDKAHRRKVDYYNTPEIRDWVRNRTGAAEVKFSAVALNWRGVLSPQSARLLKNSLGLSKYDLSLLSVVVLEKGYHIWRHFKRSTYRVRRRNRG

SEQ ID NO: 1911 - protein, 1035 aa, synthetic construct
  source 1..1035: note = MG140-213 retrotransposition protein ancestor
MFACGQCDRTFGNKGALGNHCKWKHAQTRLPERTNGGEFACPDCDNAYDSSGGLNVHRRAKHPDVYHAARQPAARVKARWSYEEMVLVARAELEIRGTNPPRGVVRVLHSRFPDRTFEAIKCLRNKNPRYKEVLAALEAEGVDEGLPTVTPSEQTHASAQADGLWRDQLRMAIDIGHLGVDDLDWVADGCPAEDIRKKLDELFASWVGHLVRGERAPARSHQPAAGVRNPGRELDPRRRRRAQYSAIQHLYGRKPSAAAHKVLDGSWECGDPVPTPTLEEFRMAWQPIFETPSIKDNRRPTCVGQVRWEIVSPVTPDELEKVLTEGASSAPGPDGVKLKDVIGLGTGELCSHFNLWLLCGSQPSALCVGRTIYIPKGSESNDALKYRPITIASHILRVFHKIMARRFDAFLPLKYTQKGFRSGDGIAQHVLSLQAIIDGAKRRCKPVNLVFLDVRKAFDSVSHDTIVLAMRRLGCPDPFLSYIRDLYSRSSTVIEHNGERSAPIFTRRGVKQGDPLSPFMFNAVIDWAFSSLDDHIGFSFGHVRVNNLGYADDVALLSDTQAGLRSQLGQFESHLAKGGLTISAGTEGKSASLSIAVDGKAKRWVVDQTPFLATNADIIPALSASGEYRYLGIMLGSGGAKVRSSLREELLQGLQNITRAPLKPHQRLRILRNFLLPKYLHELVLAPVADGWLNWLDTAIRANVRQWLKLPQDTPVAFIHAGTGDGGLSVPSLRYSVPVMRRKRLEAVHSATDPISTALAASPFFQKELSGLSRKTLGGRLVTDKQSLAQAWAGCLHTKVDGRGLSEARSCAEGSRWVSNPPRNQSGANYIGAIKARGGLLCSKVRSARGDSGRDVRCDSCMRPETAQHIIQVCPRTSGPRMRRHDRVVQFVSAAAERAGYKVLVEPRIVGRTLGVRKPDLVLWNESRAYVADVTVTSDQVGGVKAHRDKVAYYDQPEIREWVEKYTGRSDISFSAVAANWRGVLSPLSADFLKSVLKLSNWDISLLGLRICEETYHIHRYFGRSTYRVRGRGAS

SEQ ID NO: 1912 - protein, 1057 aa, synthetic construct
  source 1..1057: note = MG140-214 retrotransposition protein ancestor
MNGPTTGEEPAECPACTAAFVDPKKLVKHLRRKHGGQDIQWRCRKCHRTWPNIRSVASHYRHCKARPPTPAPGAESQPCDECGRSFSTTAGLQLHRRRKHPEAYNESLPQPTGKRNAWSDEELRRLAKAELDFGSSRNINQQLAEHFPHRTVDQIRSIRKTKRYREILQQVRQERTGESETPDEAPSPDPDGSTALSQLKKLLRELNSADDSELARAVAEYVRRTLEGGDPDSGFDELVDKIFSPKRDPKSKSRRRKRPPFEPNNRNQRKRQRYKRVQRLFRKDRKRLVQQILDGTPAQTTLPDVEDVEEVYRERFGSPSPPDDAPFTPGADDEAALGPITVEEVREALKSMKRDSAPGPDGNVTMKTLLSLPPPVLQLIFNVWLVLGRVPEALKECRTILIPKSGDAEDVNNWRPITIGSLLLRLYAKLLAKRLRKAVNLNPRQKAFVPVDGCGENIAILSSVIRHARKRRKELHIVFLDLAKAFDTVSHHSILRALRRFGVPEHFVDIVQDLYDGATTTIRTGDGETEPIPMRRGVKQGCPLSPILFNMVMDELLRNIGTEHGFELGDEKISVLAFADDLVLLSGSRDGMERMLEVCEEFFDARSMKVNARKSHSLSIVPAPKRKTMKVVEGPQWKVGGEPIPSVKATEVVKYLGVQFSPAGRPKVKLDKLKDWLQRIKKAPLKPQQKIDMLRSYILPRLMHQLRLSKVNAKTLRRLDRKIRKTVKKILHLPPGTPTDFFYMPTREGGLGLPELTETVPAARLKLITSMRSSEDPVVRAVAKQSHWLERERWVRALGTQSATELKTLKRRLERFTNSTTGRGHKSMANSPAKNSWLRNGRGLSGREYVTACHMLSNTLPTRVNLHRGRPDANKTCRRCHKTAETQAHVLNGCPATKGAMTKRHNRVCDMIARALKKKGSTVLREPRFRVPNGRLRPDLVVIKGDKVYVVDVTVPYDNSAEYLDQRYQEKVDKYGPLVPQIKKKFGAERVEVLAIVVGARGLLCQGTNETLKKLGLSKKQARSLSMTALRGSMKIWGVFGNRSEGRFERAPDTGTP

SEQ ID NO: 1913 - protein, 1056 aa, synthetic construct
  source 1..1056: note = MG140-215 retrotransposition protein ancestor
MYPTTGEDPQECPVCNSSMIDPKQIVDHFRRKHHGLSMQWKCRKCERDWPNIRSVASHYRHCTGRPPSLASPAKSHKCDECGRAFSSLAGLQLHRKRKHPEAYNESLPRPTGKNRPWGDDELRRLASAELDFGTSKHINQRLHDHFPHRTVEAIATIRKSKRYRCILKKVVEDRSGESETQEEARASDPDDSIVLEQLRKRIAELESGDSSPTVRAVLAYTRKSLADGDADSGLDLLPSEIYSPKPTPPSKSRRRKRAPFEPQNRSQRRRQHYKQVQNLYKRNRKQAAGVILDGSPVQTVFPDVEKVDEVFRGRFSRPSPPDDAEFTVCPGDEMNMGYITAEEIQQARSSMKKDNAPGPDRNVTMDTVLSLELPVLELLFNTWFALGQVPAAFKEARTILLPKSGDASDPNNWRPITICSLIGRLYAKLLANRLSKCANLSERQKAFVPVDGCGENTAILSAVIAHAHKARRQLHIAFLDLAKAFDTVPHTSIIRALRRKALPEHFIDIVENLYTDATTSISTGDKSTESIPMRSGVKQGCPLSPILFNLVLDELIRNIGTNNGISLGDSKIAILAFADDLVLLSGSKDGMESNLKVCEEFFDARSMKINARKSMSLSIVRAHKRKTMMTDEGPQWKVGGEFLPAIKHTEEIKYLGVQYTAAGRSVAKFPKLDEWLQRLKKAPLKPQQRIDMVRSTITSRLIHTLRLCRVHAKLLKNLDRKIRTFVKGVLHLPPGTSTDFFYIPIRKGGLGLQEFMSLIPAAKLKLINSMKKSSDPVVVEAVRQEHWLREERWCRRVTSLTGNKDEALRRRVERYISSHTGQTQVGFANLPGQSRWLEGGRGLSGREYIVGCHMMSNTLPVRTRTFHGGPDRVTTCRYCHGVPETPSHALQSCPKVRDAVTKRHNTILTMLQRFLTPNHDSVIREPWFRGPEGRMNPDLVVKQGRMVYVVDLTVPYDSSIEFMDSQAQRKVDKYEVLVPLIKEKFQAERVEVLGLAVGARGLLTQAGVDVCQKLGLSHRQRRCLSMTALKQTCAIWGLFQSRPQGTFNKVPDTGTS

SEQ ID NO: 1914 - protein, 1056 aa, synthetic construct
  source 1..1056: note = MG140-216 retrotransposition protein ancestor
MYPTTGEDPQECPVCNSSMIDPKQIVDHFRRKHHGMSMQWKCRKCERDWPNIRSVASHYRHCTGRPPSLASPAKSHKCDECGRAFSSLAGLQLHRKRKHPEAYNESLPRPTGKNRPWGDDELKRLAAVELDFGTSKHINLKCHDHFPHRTVEAIATIRKSKRYRDILKEVVESRSLEQETREEAQASDPDSSIVLEQLRTRIAELESGDSSPSVRAVLAYTRRSLADGNASSGLDLLPSEIYSPKPTPASTSNRRKRTPFAPQNRSQRRRQHYKQVQSLYKRNRKQAAGVILDGSPIQTVFPDVEKVDEVFRGRFSRPSPPDDAEFTLCPGDTMNMGYITAEEIQQCRSSMKKNNAPGPDRNVTMDVVLALELPVLELLFNTWFALGQVPAAFKEARTILLPKSGDASDPNNWRPITICSLIGRLYAKLLASRLSKCANLSERQKAFVPVDGCGENTAILSAVIAHAHKTKSQLHIAFLDLAKAFDTVPHTSIIRALRRKALPEHFIDIVENLYTDATTSISVGDKSTPSIPMTSGVKQGCPLSPILFNLVLDELIQNIGTNNGISLGDSKIAILAFADDLVLLSGTTDGMESNLKVCEEFFDARSMKLNARKSMSLSIVRAHKRKTMLTDEGPQWKVHGEFLPAIKHTEEIKYLGVRYTAAGRSIAKFPKLDEWLQRLKKAPLKPQQRIQMVRSTITSRLIHTLRLCRVHAKLLKNLDRKIRTFVKGVLHLPSGTSTDFFYIPIRKGGLGLQEFMSLIPAAKLKLINSMKKSSDPVVVEAIRQEHWLREERWCRKVTSLQGNKDEAERRRVERYISSHTGQTQVGFANLPGQCRWLEGGGKLTGREYIVGCHMMSNTLPVRTRTFHGGPDRVTTCRYCPGVPETPSHALQSCPKVRDAVTKRHNTILTKLQHFLTPNYDSVIREPWFNGPEGRMNPDLVLKQGRMVYVVDLTVPYDSSIEFMDSQAQRKVDKYEVLEPLLRQKFQAERVEVLGLAVGARGLYTQTGVDVCQKLGLSDRQRRCLSMMALKQTCAIWGLFRSQPQGTFNKVPDTGTS

SEQ ID NO: 1915 - protein, 1057 aa, synthetic construct
  source 1..1057: note = MG140-217 retrotransposition protein ancestor
MTYPTTGEEPSKCPACGEAFTSTKSLVKHLRRAHGGEEIQYRCRKCHREYPNIRSVASHYRHCKGRRPSPEPASKEFPCPHCGRSFSTKAGLSLHRRRAHPEEYNESLPTPTGKRRRWSDEELRMLARMELDLPGSRHINQLLAERFPNRTIEAIRSIRRKPKYRELLQELRETPSADEDPSEAGSTSDPASSIPSPELREALRELTEEDDVHAVRSSLEYTEKVLESDDVDEAFDDFIEQLYPPRRRRKPKRRPRKRPPPRPNNRSQRRRQQYKRVQRLFRKDRKRLVKQILDGSPTSSTLPPVEDVEEVYRDRFSTPSPPDSAPFTSKPSNSALLGPITVEEVKKALKSMKRNSAPGPDGEITMKTLKSLPPKVLAAIFNVWLLMGRVPESLKECRTVLIPKSGDPDDVNNWRPITIGSLLLRLYAKILARRLSKAVNLNPRQKAFVPVDGCGENVAILDSVIRHARKRRKELHIVFLDLAKAFDTVSHDSILRALRRFGVPEHFVDIIRDLYDGATTTISCGDGETEPIPIRRGVKQGCPLSPILFNMVMDELLSSIGDEYGFELGDERISALAFADDLVLISDSRSGMERLLDQCEEFFDARSLKVNAKKCASLRLAPAPKRKTMKVVTEPTFRINGEPIPSVGPDDTVKYLGVQFSPSGKPKVKVDKLKDWLERLKKARLKPQQKIHMLRSYIIPRLMHQLRLGKVNKNTLKRLDRLIRRTVKKFLHLPPGTPTSFFHMPVKDGGLGLPSLRETVPVARLKLITRLASSDDPVVRAVAESDHWRKELRRCRRASDINSLKKELQKQRRERFTNTTQGRAHESFANSPAKNSWLHNGNTLSGREYINACKLLSNTLPTRVNLHRGRPDADKRCRRCGKTPETQAHVLQSCPATKGAITKRHNRVCDKIAKALRKKGWTVLREPRFRTPNGLLKPDLVVVKDDRVYVVDVTVPYENSADYLEERYREKVDKYEPLTEQVKKRYGAKDVEVLGIVIGARGTWCPRTNKVLRKLGLSKSTRRTLSMTALRGSLRIWRCFGTRSRSRRGKVPNRGAS

SEQ ID NO: 1916 - protein, 1057 aa, synthetic construct
  source 1..1057: note = MG140-218 retrotransposition protein ancestor
MLYPTTGEEPSKCPECGESFVSQKSLVKHLRRAHGGEEITWRCRKCHREYPNLRSVASHYRHCKGRPPSPEPSSKEFPCPECGRSFSTLAGLQLHRRRKHPEEYNESLPTPTGKRRRWSDEELRMLARAELDLPGSRHINQQLAERFPNRTIEAIRSIRKKPKYREILQELRETESADEDPSESGSTSDPDSSLPSPELREALRELTEADDVQAVRSALEYTEKVLESGDVDEAFDDLIEQVYPPRRRRKPKPRPRKRPPPRPNNRSQRRRQRYKRVQRLFKKDRKRLVKQILDGSPTQTTLPDVEDVEEVYRDRFSTPSPPDDAPFTSKPGNSASLGPITVEEVRKALKSMKRNSAPGPDGEITMKTLLSLPPKVLAAIFNTWLLLGRVPESLKECRTILIPKSGDPDDVNNWRPITIGSLLLRLYAKLLARRLSKAVNLNPRQKAFVPVDGCGENVAILDSVIRHARKRRKELHIVFLDLAKAFDTVSHDSILRALRRFGVPEHFVDIVRDLYDGATTTISCGDGETEPIPMRRGVKQGCPLSPILFNMVMDELLSSIGDEHGLKLGDEKISALAFADDLVLISGSRNGMERLLDQCEEFFDARSMKVNAKKSASLRLAPAPKRKTMKVVEEPTFKINGEPIPSVKPTEVVKYLGVQFSPSGKPKVKLDKLKDWLERLKKAPLKPQQKIQMLRSYIIPRLMHQLRLSKVNANTLKRLDRLIRRTVKKILHLPPGTPTDFFHMPVKDGGLGLPELRETVPVARLKLITRLRSSDDPVVRAVAESDHWKRELRWCRRASDLNSAKKELQKQRRERFTNTTTGRAHESFANSPAKNSWLHNGNTLSGREYILACHMLSNTLPTRVNLHRGRPDADKTCRRCGQTPETQAHVLQSCPATKGAITKRHNRVCDKIAKALRKKGWTVLREPRFRTPNGLLKPDLVVIKGDRVYVVDVTVPYDNSAEYLEERYREKVDKYEPLTEQVKKRYGAKEVEVLGIVIGARGLWCPATNKVLRKLGLSKSTRRTLSMTALRGSLRIWRCFGNRSKGRRGKVPDRGTS

SEQ ID NO: 1917 - protein, 1056 aa, synthetic construct
  source 1..1056: note = MG140-219 retrotransposition protein ancestor
MYPTTGEDPQECPKCNSSLIDTKQIVDHFRKKHHGVSVHWKCRKCERDWPNIRSVASHYRHCTGRPPSLEGPSKSHKCDECGRSFSTLAGLQLHRKRKHPEAYNESLPRPTGKNRPWGDDELKRLAGVELDLGGTKHINLKCQDHFPHRTIEAIASIRKTDRYRDILREIRETRSIEQETGEGATTSEPDSSIVEARLRSRIAELKSGDSSPSVRATLAYTERCLEDGNASSGLDLLPEEMYRPRKTSASKTNPGKRTPFRPQNRSQRRRQHYKQVQSLYKRDRKQAVGVILDGSPLQTVFPDVEKVDEVFRGRFSRPSPPDDAEFNSSPGGTLNMGYITAEEIQKCRDSMKKNNAPGPDREITMDVLLALELPVLELIFNTWLALGQVPAAFKEARTILIPKSGDASDPNNWRPITICSLISRLYAKLLASRLSKCANLSERQKAFVPVDGCGENTAILSSVIAHARKTKSQLHIVFLDLAKAFDTVPHTSILRALRRKALPEHFIDIVENLYTDATTSISVGDKNTSSIPMTSGVKQGCPLSPILFNLVLDELITNIGDDNGLDLGDKKIAILAFADDLVLISGTKDGMETNLKTCEEFFDARSMKLNARKSVSLSLVRAHKRKTMLTDERPKWKVHGEFLPTIKHTEEVKYLGVRYSAAGRPMAKLPKLDDWLQRLKKAPLKPQQRIQMVRSTITSRLIHTLRLSRVHAKLLKNLDRKIRSFVKSVLHLPSGTSTDFFYIPVRKGGLGLQEFMTLIPAAKLKLINSMKKSSDPAVIAAMEQDHWLREERWCRKVTSLQGNKEDAERRRLERYINSPTGKSQVGFANLPGQCNWLEGGAKLTGREYIVGCHMMSNTLPVRTRTFHGGRDRVTTCRYCPGVPETPSHALQSCPVVRNAVTKRHNLILTKIQHFLTPNYDSVIREPWFNGREGRMNPDLVLIQGKMVYVVDLTVPYDSSPEFIDSQAQRKVDKYDTLKPLLRQKFQAERVEVLGLAVGARGMYTSAGVQTCAKLGLSERQRRCMSMMALRQSCAIWGIFNSQPQGTLNKVPDTGTT

SEQ ID NO: 1918 - protein, 1246 aa, synthetic construct
  source 1..1246: note = MG140-220 retrotransposition protein ancestor
MVYNVPTTVNFGDHTSLWQKKHPPCKLLFVCGKCNKKFASIRGVSVHFRKCKGTRTKCNYCGRSFDTFKGLRAHQRRAHPAEYDRKLEVKKRRWSEEELERMARVEAGFPGGAVNQHLQGLFPGRTVDSIKSRRKNPEYKRLVSELKEGLAAAQKLKFGAPKEPTSINGTTPEADTTASQSPPDEPLLVRPSHSINGSAPRKEADVDYTRPSCGQAAVSAAKPVPPPPSIALLPAQTDTPNKRRLSSPSLPGGLPDSDAKAKRERGTPNRPLPSRLLPNTTSGSPTALPSRGPNQEAEPVPAVPPEAGSPEPAAVPEPVGDEAALQQPEAPIGDLMNIRSPSWSARDERAVALRTGGAPVAPLAGILPQAPPDRLNRASAAVSEFRAALESLFEAREGLRKVQSLVRKALLDGGEELEAELNEFIESLYTKAKPNNRRGPPAPKNYGTSRHRRGKRAARYKRFQHMFRKDRARLAEVILDGRELEEASELPSLEDVEDVYGNIFESASPEDDAPLTSPKPSVKLYYPITEEEVEKALNNMKSSAPGPDGITVEHLKRLPPKKLLALFNLVLLSGRFPPSWKKCRTVLIPKSGDRLDANNWRPITISSALVRLFHRILAKRLSSVVPLHPSQRGFVPTDGCFENVLILDAIIKEARAKNKELNVVSLDLRKAFDSVSHSSILRALRRHGIDERFVSYIMDSYRGCTTDISCGGNTTRPIKIKRGVKQGDPLSPILFNLVLDELLDNLPTPDCGVTIGTGERVPCLAYADDLVLLSDSKAGMRLLLRETEEFFSKRGMALNPKKCVSLRLATTKGRVVVDTKSVFSIDGEPIKAVGSADSFKYLGHRFDPTGKLKPNLEELEDWLERLKRAPLKPQQKLVLLRDHLIPKLLHKLTHGRVTKGLLKEFDRLVRRFVKRILHLPKHTPNAFLHAKVKDGGLGILSLREAIPLILLKRMRKLLGSSEDPVLREILNSEYLRKLLKRLKKLAGTVPTGEVSHEELQSSYDGRGLEQAASNPGSRSWLNSPPSFWSGRDFVRAVQLRCNTLPTRGNPSNPPGERKCRHGCKRTETLCHILQGCPLTHGARIRRHDRIVDLIAKKARKKWTVVWEPRIRHTDGGLRKPDLVIVKDDKVIVVDVSVSWEGPDSSLEAAWDRKRKKYENPEFLEALKRRYPGKPVTFLPLIIGARGVWCSSNRKVVKALGLSKALRDVVVVRCLEGSIKIWKSFMKRVWASDSAGRPDGVHERAAG

SEQ ID NO: 1919 - protein, 1246 aa, synthetic construct
  source 1..1246: note = MG140-221 retrotransposition protein ancestor
MAYNVPTTQNFGDHTSLWQRKAPPCKLLFVCGKCNKNFASQRGLSVHLRKCRSTRTKCNYCGRRFDTFKGIRQHQRRAHPAEYDRKLEAKKRRWSEEELERMARLEAGFAGGYINQHLQGVFPGRTVDSIKSRRKKPEYKKLVAQLKEELAAAQKLKFGAPKEPTSISGSTPPADSTASKSPPDEPLLVRSSHSVNGSAPRKEADVDYTRPSCGQAAVSAAKPVPPPPSIAPVPAQTDTPKKRRLSSPSAPGGAPDSDAKAKRDRGTPNRPLPSRLLPNTTSGSPTALPSRTPSQEAEPVPAVPPEAGSEEPAAPPEPAGDEAALQQPEAPIGSLMNIRSPSWSAREERAVALRTGGAPVAPLVGILPQAPPDRLNRASAAVSEFRAALESLFDAREPLRKIQSLVRSALLDGGEELEVRINEFIESLFTRAKPNNRRGPPRPKNYGSSRHGRGKRAARYKKYQNMFRKDRARLAEVILDGRELEEASELPSLEDVEDVYANIFESASPDDDEPLSSPEPSVKLYSPITEEEVELALNNMKSSAPGPDGITVPHLKRLPPNKLVCLFNIILLRGYFPPSWKECRTVLIPKAGDRLDANNWRPITISSALQRLFHRILAKRLSSVVPLHPNQRGFTSTDGVFANTLILDAIIKSRRAKGKPYNVVSLDLRKAFDSVSHSSILRALRRHGIDERFVSYIMDSYRGCTTTISCGGNTTRPIRIRRGVKQGDPLSPILFNLVLDELLDNLPTEDCGVTIGTGEKVPCLAYADDLVLLSDSKAGMRLLLAETEEFFSERGMALNPKKCVSLTVATTKGRVVVRTKSVFSIDGEPIKAVGSADSFKYLGHRFDATGKMKPNLDELETWLERLERAPLKPQQKLVILRDHLIPKLLHKLQSPRVTKKLLKEFDRLVRRFVKRILHLPKHTPNAFLHAKVRDGGLGILSLRDAIPLILLKRMRKLLGSSEDPVLSEILNSDYFRKLLERLLKLAGSVPTGEVRREALQNGYSGNGLQQAASNAGSRSWLNSPPSFWTGRDFVRAVQLRCNSLPTRGNPSNPPGERKCRAGCKRTETLCHILQGCPLTHGARIRRHNHIVDLIAKNARKKWEVEWEPRVRHTDGGLRKPDIVIVKDDKVIVVDVGVSWEGPDGSLEAAWDRKRKKYENPKFLEALKRRYPGKRVTFCPIIIGARGVWCSSNRRVVEALGLSKALRSTVVESCLKGGITIHRTFMKRVWASDNAGRPDGVHERAAG

SEQ ID NO: 1920 - protein, 1246 aa, synthetic construct
  source 1..1246: note = MG140-222 retrotransposition protein ancestor
MGYRVPTAQNAGDKTSSCQRDAPPANAQFVCASCNSRFDRKSGLSLHMRKCGNTRTKCNYCALRLGTFKSIRQHERRTHPAEYTRDLEAEKPQPDTEAFEKLARLEAGSAGGYVNIKAMSAATGLTIDQVRSRRKKPEYKRYLAMAKEELAAARKFKFAAPKEPTSIPASTPPGDSTASKSPPDQPVAVRSSNSADGSAPRKNANVDYTRPSCGQAAVSAAKPVPTPPSVAPVPCQTDTPKKRRLSSPSVPGGVDDSDAKAKRDRGSPQRPLPSRLLPNTTSGSPTAGPSRTPSQEAAPVPAVPPRAATEPPASPPTPAGDEAALQQPEAPITSCKRLRAPSLSPRLERAVALRTGGAPVAPLVGILPQAPPPRLNRDSAFASEFRGALEAILEAEEPVRKIHDLVRSALLDSNQELQVAIDEFLESIWSKKKPNGRRGPPRPKNYGSSRHGRGKRAAEYKKAQDMFRKDRKGLAEVILDGRDLYEPPELPSLQDVEDLYANIFESASPEDNEAVSSPKPQVRTFPPITEEDVELAMSNWQTSAPGPDGITIPQVKRMPPRVLATVFNIILLRGIFPSSWKELRTVLIPKGGDRTDANNWRPITIASALQRLFHRVLLRRLSSVTRLHPNQRGFRSTDGTFANVLILDAYIKSRRARGKAYNVVSLDLRKAFDSVSHNSILRALKRAGIDERLASYIMDSLRGCTTTIEVGGEATRPIAIKRGVKQGDPLSPLLFNLVLDEILDRISTEYRGGTIGSGTKVPVMAFADDLVLLSDSQLDVPLMLADIEEFFCQRGMAINPKKCVSISAATIKGRTIVRTKSIFSINGQPIPCVGSINSFKYLGHRFGATGMMKPNLPNLQTWLERVEKAPLKPHQKLCILRDHLIPKLLHGLQSPRVTGAILKEVDRLVRRFVKRILHLPIHTPNCFIHAKVRDGGLGILELRRAIPQILLKRMRKLLSNSEDPVLSSVLSSEHFRKILQRLSKLAGNVPTGELHREAIINGPSSAGLEAVADDAASRDWLHSKPQGWTGRDFVRAVHLRTNSLPTRGHPSNPPDQRKCRKGCQKNETLSHILQRCPAVHGVRIKRHNEIVGKIAKHARKKWEVEWEPHVRHTDGQLFKPDIVIHKDDKVVVVDVQVSWEGNDGSLAPAWDRKRAKYENPKFLEAATRRWPGKRVTFCPIIIGARGVWPSCNRPTVNGLGLSKALKSSCVESCLKWGSTIHKTFMRRVWANDNAGRPPGIAERAAG

SEQ ID NO: 1921 - protein, 1246 aa, synthetic construct
  source 1..1246: note = MG140-223 retrotransposition protein ancestor
MGDRVKTAQDAGSKTSSCQRDAPPANAQFVCVSCNSRFDRKSSLSLHSKSCGNTRTKCNYCTVSLTTYKLIRQHERRAHQAEYKRDLEAEKPQPDSASFEKLAALEAAAKGGVVSIKAMTTATGLTTHQIRTKREKPVYKKYLEMAKRDQAAKSKLLFGATSSPTSLSSSTSRTNATTTASPPSRAVTVQRQNSADGTAPRKNASSSYTRGPCPKASTSASPPGPPPPSVARIPSQTDDGKRRRLSSPSVPAGVPTSDRKKKRTQGSPQRPTPSRLLPNTTSASATGLPSRTPQQQASPGPDVPPAAPNKPASRPPAPAGDESALQQPEAPITSCKRLRSPSLSPQMQQAPALRTTSATVTPLRSRLPHAPPPRLNRDSAMASEFRQALEAVLEAEEPCPGIHRLVRSALSDNNDRLQVRIDEFWESTWPRTKPRERRRPPRPSNYGSVHHGRGRRAAEYKKAQDMFGKDKKGLADVILEGRELLTPPELPSLQQVEDVFAGIWESGSADDQQAATSPHIPVRSLPPIFEADVQLAREHWHKSAPGPDGITVPQVCRMDPRVLATVFNIILLRGVFPSSWRELRTVLIHKGGSRTDPNNWRPITIASALQRLFHRVLLRHLSSITTLHPSQRGFRSVDGTFANAVILDAYIKSRRAQGKAFNIVGLDLRKAFDSVSHNAISKALARAGVDERLATYILTSLTGCATQLDLGGKKSRPINIQRGVKQGDPLSPLLFNLVLDPILQHISTCFKGGTIPGGDKVPVIAFADDLFLLSDDDLEIPLMLHALEEYLTQQGLAINPRKCVSISAATIQGKSVVRTKSLFRISGSLIPCVGSVNSFKYMGHQFGEKGMMQSNLGNLRTWLERVLKAPLKPHQKMCLLRDHVIPKLLHGLSSPATTGDKLREADRLIRRFVKRTLHLQIHTANHFIHARIRDGGLGILELRKAIPEITLRRCRGLLNATDDPVLASFTSSDHFQKLLNRLSKLAGTVPSTEVHRELIITGPSSAGLEAVADDPASRQWLQSKPQGWTGRDFVRAVHLRTNNLPTRDHPSNPPELRKCRDGCEKNESLRHILQQCPRVQGLRIRRHNEIASKIARAARKKWEVEWEPHVKHNDRQLYKPDLAIHKPDQLVIVDVQVSWEGKENSLAVAWDAKRNKYTTPHFLEAAARRWPGRRVTTLPVILGARGIWPSCNRTTVNTLNLSSALRRSCVESCLKWGSTIHKTFMASVWASSTRGRPQGLSSRSAG

SEQ ID NO: 1922 - protein, 1247 aa, synthetic construct
  source 1..1247: note = MG140-224 retrotransposition protein ancestor
MTSTAANSEADSAGTDKGCNEAAPAKKVTYVCGKCNKSFENVNGVACHFPKCKGTEFPCPYCGRSFSTKRGLSQHRRRAHPEEYNEELPTGKAGKKRRWSEMLARMEAELPGSTINQQLAERFPNRTLEAIKGQRRKPKYRELLQELREEAADSEKPAGAPPAEDPGISDPPSESESAAGAASPDDPVSEPGPRTPDGTVPSPPADAKNKKEPVPPLKTLAEPPPPLPPSTATTPGQLDDPKTLSPASPGAEPPLADSDTVKKNDVGEPGGPPPSRTEPPGTGDVPTPGPAPSGEADGPPGSDPDPSSDSEPDDVADDDGGAEAALNQPEAPITLLKLASPPDWRPRPPHVSALRTGGAPVAPLAGRLPQVPEEALKELAELAGATRESLEEVLEANAARQRVQTLLDEVLLGDGDDVDKALDDFIEQLFGAHRPKRRRRRPRPKPSPTPKNRRQRRRQQYARVQRLFRKNRKRLAKQILDGNESLEASSPPPVEDVEEVYRDIFETPSPPDNAPFTSKPSNTDLFHPITAEEVKKALKSMKNSAPGPDGITVKDLKKLPPKVLAALFNLVLLTGRVPSSWKKCRTVLIPKSGDPLDANNWRPITISSVLLRLFHRILARRLSKAVNLNPRQRGFVPVDGCFENVMLLDSIIRHARRRRKELNIVFLDLRKAFDSVSHDSILRALRRMGVDEHFVDYIRNLYEGCTTTISCGGQKTEPIRIRRGVKQGDPLSPILFNMVMDELLSSLPDTEIGFKLGTDQRISALAFADDLVLISDSRAGMQRLLDQVEEFFDARGLKLNAKKCASLSLKPSGKKVVVDTEPTFRINGEPIPAVGPDDTFKYLGVQFGPSGKTKPTVDKLKDMLERLSRAPLKPQQKLVILRTHIIPRLLHQLTLGRVSKNLLKRLDRLIRRAVKKILHLPHDTPNAFFHAPVKDGGLGIPSLRETVPMMLLRRLERLLASSDDPVIRAVAKSEHFRKLLRRCSRMLGVGGSLKEEMEQLYNSVDGRGLEQFSNNPASNSWLHNPTSLLSGREFINAIKLRCNTLPTRANASRGDADRRCRHCGQRTETLSHILQSCPATHGMRIKRHNRICDLIAKKLRKKWTVIREPRIRTPNGKLRKPDLVVVKDDRVFVVDVTVTWENPDSSLEEAWREKVDKYDTEELTEQVKKRYGAKDVEFLPIVIGARGVWSPKNNKVLKQLGLSKSTRKTLVVRALEGSLRIWRCFMRSTSSKRRRGRPGGVPNRGAG

SEQ ID NO: 1923 - protein, 1247 aa, synthetic construct
  source 1..1247: note = MG140-225 retrotransposition protein ancestor
MTSTAAKSEADSGGTDKGCNEAAPPAKVKYVCGKCNKSFENVNGVACHFPKCKGTEFPCPYCGRSFSTKRGLSQHQRRAHPEEYNKELPTGKAGKKRRWSEMLARMEAELPGSAINQQLAERFPNRTLEAIKGQRRKPKYKELLQELREEAADSEKPAGAPPAEDPAISDPPSPGEASAGAASPDDPVSEPGPRTPDGTVPSPPADAKNKKEPVPPLKTLAEPPPPLPPSVATTPGQLDDPKTLKPASPGAEPPLADSDAVKKNDVGEPGGPPPSRTEPPGTGDVPTPGPAPSPEADGPPGSDPPPSSDSEPDDVPDEDGGAEAALNQPEAPITLLKLASPPDWRPRPPHVSALRTGGAPVAPLAGRLPQVPPEALKELAALAGETREALEEVLEANAARQRVQTLLDEVLLGDGDDVDKALDEFIEQLFGAHRPKRRRRRPRPKPSPTPRNRRQRRAQQYARVQRLFRKNRKRLAKMILDGKESLEASSPPPVEDVEDVYRDIFETPSPPDNAPFESKPSNVDLFHPITAEEVKKALKNMKNSAPGPDGITVKDLKKLPPKVLAALFNLVLLTGRVPSSWKECRTVLIPKSGDPLDANNWRPITISSVLLRLFHRILARRLSKAVNLHPRQRGFVPVDGCFENVMLLDSIIRHARRRRKELNIVSLDLRKAFDSVSHNSILRALRRMGVDEHFVDYIRNLYEGCTTTISCGGQKTEPIRIRRGVKQGDPLSPILFNMVMDELLSSLPDTEIGFKLGTGERVSCLAFADDLVLISDSRAGMQRLLDQVEEFFDKRGLKLNAKKCASLSLKPSKKKVVVDTEPTFRINGEPIPAVGPSDTFKYLGVQFGPSGKTKPNVDKLKDWLDRLTRAPLKPQQKLVILRTHLIPRLLHKLTLGRVSKNLLKKLDRLIRRAVKKILHLPHDTPNAFFHAPVRDGGLGILSLRETVPLMLLRRLERLLASSDDPVIRAVAKSEHFRKLLRRCSRMAGVGGSAKEELEQLYNSYDGRGLQQFANNPASRSWLHNPPSFWSGREFINAVQLRCNTLPTRARASRGDADRRCRACCQRTETLSHILQSCPATHGARIKRHNRICDLIAKKARKKWTVIREPRIRTPNGKLRKPDLVVVKDDRVFVVDVQVAWENPDSSLEEAWREKVDKYDTEELTEQVKKRYGAKEVEFCPIVIGARGVWSPANNKVVKALGLSKSTRKTLVVRALEGSLRIWRCFMRSTSSKRRRGRPGGVPNRGAG

SEQ ID NO: 1924 - protein, 1247 aa, synthetic construct
  source 1..1247: note = MG140-226 retrotransposition protein ancestor
MTGTSVKTEQDSGDSSSGCEEAAPPAKVRFVCGKCNKNFENERGLACHLRKCRGRETPCPYCGRRFSTFKGIRQHQRRAHPEEYNRELEAGKAGPNRRWSERLARMEAELPGSTINQQLAEAFPGRTIEAIKSRRRKPEYKELLEQLREELAEAKKPAGAPPGEEPALPDPPSPGEATASASPPDEPVSAPGPNSPDGTPPRKDGDVEYKREPVPPASTAAEPPAPLPPSVATVPSQTDDPKRRKPAAPSAEPPLADSDAVKKRDLGEPGRPPPSRLQPPGTGGVPTAGPAPTPEEEAAPGPDVPPSAESEPDAVPPEPAGDEAALNQPEAPITTLKRLRPPAWSPREPRAAALRTGGAPVAPLAGRLPQVPPDALKEAAALASETREALEEVLEAEAACPKIHSLLDEVLLGDNDDLLKALDEFIEEIFGTHRPKGRRGRPRPKNRGTSRNRRGRRAAQYKRAQNMFRKDRKRLAEVILDGRELLEASELPSVEDVEDVYRDIFESPSPDDDAPFESPESQVDLFSPITAEEVEKALNNMKSSAPGPDGITVKDLKKLPPRVLAALFNIILLTGYVPSSWKECRTVLIPKSGDPLDANNWRPITISSALQRLFHRILARRLSKAVPLHPNQRGFRPVDGVFANVLILDAIIRSRRARGKPYNIVSLDLRKAFDTVSHNSILRALRRMGVDERFVDYIMDSYRGCTTTISCGGQKTRPIRIRRGVKQGDPLSPLLFNLVLDELLSSLPDVETGFRLGTGERVSCLAFADDLVLLSDSRAGMQLLLDQVEEFFSARGMALNAKKCASLSVAPSKGKVVVRTEPVFRINGEPIPAVGPTDTFKYLGHRFGATGKTKPNLDKLKDWLERLTRAPLKPQQKLVILRSHLIPRLLHKLQSPRVTKNLLKKLDRLIRRAVKRILHLPRDTPNAFLHAPVRDGGLGILSLRETIPLILLRRMRRLLGSSEDPVIRAVLKSEHFRKLLKRLSRLAGAVPTAKEHREALYNGYSGNGLQQVANNPASRSWLHNPPSFWSGRDFVRAVQLRCNTLPTRGHPSNPPDERRCRAGCQRTETLSHILQKCPATHGARIKRHNRIVDLIAKHARKKWTVEREPRIRTSDGQLRKPDLVVVKDDRVLVVDVQVSWEGPDSSLEEAWEEKRDKYENPEFLEAVKRRYPGREVEFCPIIIGARGVWAPSNRRVVEALGLSKSTRKTVVERCLKGGITIHRTFMKRVWSKRRRGRPDGVPNRGAG

SEQ ID NO: 1925 - protein, 1246 aa, synthetic construct
  source 1..1246: note = MG140-227 retrotransposition protein ancestor
MGDRVKTAQDAGSKTSGCQRDAPPANAQFVCASCNSRFDRKSGLSLHMRKCGNTRTKCKYCALRLSTFKSIRQHERRAHPAEYTRDLEAEKPSPDTEYFEKLARIEAGSAGGVINIKAMSAATGLTIDQVRSRRKKPEYKKYLEMAKEELAAARKLKFAAPSEPVSVPASASPGDSTTSASPPDQPVTVRRSNSPDGTPPRKNANVDYTRPPCPKAATAAAKPAPTPPSVAPVPCQTDDPKRRRRESPSADPGVPDSDAVKKRDRGPPLRPTPSRLQPPTTSGSPTAGPSWTPQQEAAPGPDVPPAAETEPPASPPTPAGDEAALAQPEAPITTCKRLRAPSLSPRLPRAPALRTGGAPVAPLVGRLPQVPPPRLRRDSALASELRQALEAVLTAEAACPKIHKLVKSALLGSNEELLVAIDEFLDSIWSKKKPRGRRGKPRPKNYGSSRGGRGRRAAEYKKAQDLFRKDRKGLAEVILDGRDLLEPPELPSLQDVEDLYGNIFESASPDDNEAVSSPHPQVNTFPPITEEDVQKAMENWQTSAPGPDGITIPDVKKMPPRVLATVFNIILLRGIVPSSWKELRTVLIPKGGDRTDANNWRPITIGSALQRLFHRVLLRRLSDATSLHPNQRGFRSVDGTFANVLILDAYIRSRRARGKAYNIVSLDLRKAFDTVSHNSILRALKRAGVDERLASYIMDSLRGCTTTIKVGGEKTRPINIKRGVKQGDPLSPLLFNLVLDEILDHISTEYKGGTIGSGTKVPVMAFADDLVLLSDSQLDVPLMLHEIEEFFCQRGMAINPKKCVSISAAPVKGKTIVRTKSIFRINGQPIPCVGSINSFKYLGHRFGATGMNKPNLPNLQTWLERVSKAPLKPHQKLCILRDHLIPKLLHGLQSPRVTGDILKEVDRLIRRFVKRILHLPIHTPNAFIHARVRDGGLGILELRHAIPQILLRRMRKLLSSAEDPVISSVLQSEHFRKILQRLSKLAGTVPTGQAHREAIINGPSSAGLQAVADDPASRQWLHSKPQGWTGRDFVRAVHLRTNSLPTRGHPSNPPDQRKCRAGCQKNETLSHILQRCPAVHGVRIKRHNEIVGKIAKHARKKWTVEREPHVRHTDGQLFKPDLVIHKDDKVVVVDVQVSWEGNDSSLAPAWERKRAKYENPEFLEAATRRWPGRRVTFCPIIIGARGVWPRCNRPTVNGLGLSKALKRSCVESCLKWGSTIHRTFMRRVWANSRRGRPPGIASRAAG

SEQ ID NO: 1926 - protein, 1246 aa, synthetic construct
  source 1..1246: note = MG140-228 retrotransposition protein ancestor
MGDRVKTAQDAGSKTSSCQRDAPPANAQFVCVSCNSRFDRKSSLSLHSKSCGNTRTKCNYCTVSLTTYKLIRQHERRAHQAEYKRDLEAEKPTPDSAYFEKLAAMEAASKGGVVSIKAMTTATGLTTHQIRTKREKPVYKKYLEMAKRDQAAKSKLLFGATSSAISPSTSTSAANATTTASPPNRAVTVSRQHSADGTPPRKNASTSYTRGPCPKASTSASPPGPPPPSVATIPSQTDDGKRRRLSSPTVPAGVPTSDTKKKRTQGSPLRPTPSRLQPNTTSGSATATPARTPQENASPGPDVPPAAPSKPADRPPAPAGDESALQQPEAPITSCKRLRSPSLSPQMPQAPALRTNSATVTPLRSRLPHAPPPRLNRDSAMASEFRQALEAVLEAEEPCPGIHKLVTSALSDNNDRLQVAIDEFWESTWPTEKPRERRRPPRPSNYGSVHHGRGRRAAEYKKAQDLFGKDKKGLADVILEGRELLTPPELPSLQQVEDVFAGIWESGSADDQQAATSPHISVPSLPPIFEADVQLAREHWQKSAPGPDGITIPQVCRMDPRVLATVFNIILLRGVVPSSWRELRTVLIHKGGSRTDPNNWRPITIASALQRLFHRVLLRHLSSITTLHPSQRGFRSVDGTFANAVILDAYIRSRRAQGKAFNIVGLDLRKAFDSVSHNAISKALARAGVDERLATYILTSLTGCATQLELGGKKSRPINIQRGVKQGDPLSPLLFNLVLDPILQHISTCFKGGTIPGGDKVPVIAFADDLFLLSDDDLEIPLMLHALEEYLTQQGLAINPRKCVSISAATIQGKTVVRTKSLFRISGSLIPCVGSVNSFKYMGHQFGEKGMQQSNLGNLRTWLERVSKAPLKPHQKMCLLRDHVIPKLLHGLSSPATTGDKLREADRLIRRFVKRTLHLQIHTANHFIHARIRDGGLGILELRKAIPEITLRRCRGLLNATDDPVLASFTSSEHFQKLLNRLSKLAGTVPSTEAHREQIITGPSSAGLEAVADDPASRQWLQSKPQGWTGRDFVRAVHLRTNNLPTRDHPSNPPELRKCRAGCQKNESLRHILQQCPRVQGLRIKRHNEIASKIARAARKKWTVEWEPHVKHEDRQLFKPDLAIHKPDQLVIVDVQVSWEGKENSLAEAWDAKRNKYTTPEFLEAAARRWPGRRVTTLPVILGARGIWPSCNRTTVNTLNLSSALRRSCVESCLKWGSTIHRTFMASVWAQSRRGRPQGLSSRSAG

SEQ ID NO: 1927 - protein, 434 aa, unidentified
  source 1..434: note = uncultivated organism;MG153-58 reverse transcriptase
MSEIPVHPRSRRLADWINPTGARKVHSLVDKVYQRKNLEMAWEKVKANRGSGGVDGQSLEAFAAQLDQQLARLQSELIEDAYQPQPVRQVQIPKAGKPGEFRTLGVPTIYDRVCQQALLNRLEPIFEPVFDEANFGYRRGRSTKDAMRKVWKEIQSGREWIVDADLRDFFGSVDHEKLLTLVAQRIADGRVLRLIRGMLKAGSYGKGRLFPSERGTPQGSVVSPLLSNILLTPFDQEMRRKGYQLTRFADDWVVTCTSAAEARAAIAAALRILSELGVQLHPQKTRVVHVQRGFEFLGYLVKRGKQLQLPPSKIVTGAKSRGLYAYPREKSIQRFKDRVRQLTRRGVPLKTNDLIEQLNPVLRGWGHYYKRAHVRTLFNKLDHWIERRIWSHRYKCWRNCGWKQLPKRKLYGEYGLTQLVKLIPSIALQNRAPS

SEQ ID NO: 1928 - protein, 465 aa, unidentified
  source 1..465: note = uncultivated organism;MG153-59 reverse transcriptase
MKAEETRQVTTLTEELARNADGAAMGAEAGVMTRLRTKAELERGGGLMEAVCERGNLMLAYQRVVENKGAAGVDGVGVSEFKDHLRQHWPTIKAKLLDGDYVPQPVRRVDIPKPQGGVRTLGIPTVTDRLIQQALHQVLSPIFEEGFSASSYGFRPGRNAHQAVKAAKQYVAEGRRVVVDMDLEKFFDRVNHDLLMEKLSKKIDDRRVHSLIRRYLEAGMMAEGIVSPRTEGTPQGGPLSPLLSNILLTELDRELERRGHAFCHYADDCNIYVKSKVAGERVMASLTRFLSDTLKLTVNVAKSAVAHPWERKFLGYGMTWHKAPRLRVASASLKRLEDKIREVLKGARGRSLLKVIDTINPILRGWTAYFKLAETKRVMEKMDGWIRHKLRCMMWRQWKRPHARARNLMKAGLMEELAWRSACNQRGPWWNSGASHMNHAFPKVYFDRLGLVSILDTVRRLQCIQ

SEQ ID NO: 1929 - protein, 459 aa, unidentified
  source 1..459: note = uncultivated organism;MG153-60 reverse transcriptase
MAEKPKDSRRVAGGTRERKGWERQASAVGTEEPRPKAEDLLEEVLRRENLMQALKRVRSNRGAPGVDGMTVDALTPHLKGNWPRIREELLNETYVPQPIRRVEIPKPDGKGVRQLGIPTVLDRLIQQSILQVLTPVFDPHFSESSYGFRPGRGCHDAVVAARSHVEAGYRFVVDMDLEKFFDRVNHDVLMARVARRIGDKRLLRLIRRYLTAGVMIEGVAQAREEGTPQGGPLSPLLSNILLDDLDKELERRGHRFCRYADDCNVYVKSKAAGDRVMESIARFLEKRLRLKINRDKSAVDRPWSRKFLGYTMTPHDRPKLKVSPQSVKRAKAHIKEIVRKGRGRSLAKVIGELTPYLRGWVTYYRLSQVKNIFEELDKWIRRKLRLILWRQWKKPRTRAGKMIRLGIERARALTSAYNGRGPWWNAGASHMNAAITIKWLNRRGLTSLLAEHQRLACLA

SEQ ID NO: 1930 - protein, 438 aa, unidentified
  source 1..438: note = uncultivated organism;MG153-61 reverse transcriptase
MIEQILTGKNLLRAMYQVRKNHGSAGVDHMPVTKLSELMSVNRDELTEKVRSGKYLPHAILGVKIPKGNGKMRLLGIPTVTDRLLQQAVLQIITAKFEFEFLDSSYGFRPNRNLHQAVLKAQGYINEGFQHIVDIDLQTFFDEVDHCYLLQLLHRKIKCIATMRLIRKWLRAPILIDGKLVKRRKGVPQGSPLSPLLSNIMLHELDRELERQNLRFVRYADDFSIYLKTKSKARRVGNTIYKFLRDKLKLKINREKSGIRRPVHFVLLGFGFVPTYKKGERGKYQLVVSEKSWKKLKQKLKTITRKTTPMSFKERIQKLNEVQRGWVNNFRMASILVKLQDVDGWVRNRLRYCIWHHWKKSERKRKNLIRLGVEQGQAYAWSRSQMGGWAIAQSPILGTTITLDRLKKRGYESMLDIYRRKSPQLNEPLYTRPVRTVF

SEQ ID NO: 1931 - protein, 408 aa, unidentified
  source 1..408: note = uncultivated organism;MG153-62 reverse transcriptase
MLDSYKRVTSNKGAPGIDNMCVDSLHEHLKEYWDSIRNQIETATYIPQGVRKVEIPKANGGVRLLGIPTVTDRLIQQSIAQVLSRHYDSSFSENSYGFRPCRSAHQAVIRGQGYLNEGYTHIVELDLEKFFDKVNHDKLMTVLSRVVIDKPLLKLIRRYLRSGIMDGGLVSVRTEGTPQGSPLSPILSNILLDELDKELENRGLRFVRYADDVSIYVKSKRSAQRVLSSITGYIENVLLLKVNTVKSKVSLPSKSSLLGFTYGKSGRSWKPRISSKSKRSIKDKIKLATKRNWSVNIEDRLRKLSQITQGWLSYYKLAECGVFLKELDCWIRFRIRMCIWKSWKRPKKRIRELVKLGIEKWRAYMNGNTRKGYCRIAHSGILHTALTNNKLCHLGFHSLFDSYKSCYV

SEQ ID NO: 1932 - protein, 434 aa, unidentified
  source 1..434: note = uncultivated organism;MG153-63 reverse transcriptase
MGLMEVILSKENLNQAYKKVVANKGASGIDGVTVEELGSYIRENQEEIRNALRNRTYFPKPVRRVYIPKGNGKKRPLGIPTALDRTIQQAVAQPIIDIYETVFSEYSYGFRPNRSCHDAIRQALEYLNSGYEWVIDIDIEQFFDKVNHDKLIQILREQVKDSNVLNLIRKYLRAGVMEEGIIKATKTGVPQGGPISVILSNVYLDKLDKELEQRGLRFVRYADDVLIFTKSEKAANRVMTSISSWIERKLFLKVNATKSKVGRPMRTKYLGFTFLKNGGQWKVKPTNEKKANLYQVMREYLKRGKATSRPLAVTIRRVNQIVMGWINYFRIGMMKQFMEEFGQWLRHKIRVIVIKQWKRPKTIFRNLSYLNRKYKNGFNEESIFKVANSRLGLYKSCGMNVVNYILSPNLLETKIKDGAGLLNPLKYYLRKVGI

SEQ ID NO: 1933 - protein, 470 aa, unidentified
  source 1..470: note = uncultivated organism;MG153-64 reverse transcriptase
MAQPQAITYQYDLFSEQRQDVIRPFPTSETVCGASGTKAFQVKEAGEQERALTPDLMSLVLSHDNIKAAYKQVKRNKGVAGIDQMPTGDFAEWYSQNAETLQSELYNGAYQPQGVKQVEIPKPNGGKRKLGIPTVTDRIIQQAISQVLNPIYERKFSDHSYGFRPNRNAHQALKKGSEYVSEGRVIVVDMDLKTFFDVVNHDRLMYLLSTTISDKTLLWLIRKYLQSGILIDGVVSQRTEGMPQGSPLSPLLSNIVLDELDKELERRGHKFVRYADDCNIYVRSQRAGERLLASISVFIETKLKLLVNKEKSRICPVNHTKFLGYTIQRDGSLSIANESVKRFKEKVRKLTKRNRGVNFEQIIVELEPVMRGWLNYFRHARCKRLLENIDSWIRRKLRCYRLKQCKRVITLQQFLKSHGVETWQSWILALSGKGLWCKSGCPQAHQALSNRWFNDVGLYNLSLNYARLNH

SEQ ID NO: 1934 - protein, 430 aa, unidentified
  source 1..430: note = uncultivated organism;MG153-65 reverse transcriptase
MHIMTTLLDKILDRQNMYQALKNVCSNKGASGVDGVTIDEIDGYIRENWPRIKVEIEERSYKPQPVLRVEIPKPNGGTRKLGIPTVMDRIIQQAIVQVLSPIVDKEFSELSYGFRPRRNCEMAVVKLLEYFNDGYLWVVDIDLEKFFDTVPQDKLMSLIHNIIDDPDTESLIRRFLQAGIMDKGEYQPSKTGTPQGGNLSPLLSNIMLNELDKELESRDLNFVRYADDCIITVKSQASAKRVMESITSWIERKLGLKVNASKSKITRPTNLKYLGFGFWKDGRANQWKARPHQDSIKSFKDKLKSLTQRKWSISFTERLKKLNQVIRGWINYFLIGSIKGVLTEIDSRLRTRLRMIIWKMWKVPSKRQWGLQKLGINKDLARLTSYCGDRYYFVATKTCVSRAISKKILTQRGLVSPIDYYEHRRNVRFN

SEQ ID NO: 1935 - protein, 424 aa, unidentified
  source 1..424: note = uncultivated organism;MG153-66 reverse transcriptase
MKLIDLILEDDNLNLACTRVIRAKGRNGVDKMSTSDLKNYLEENRELIKSSIIDRKYKPSPVLRVEIPKEDGSMRALGIPTVKDRMIQQAIAQVLSPIYEDIFSDSSFGFRPKRNAHMAIEKALNHMNQGKEWVVDIDLEKFFDKVNHDKLMQIISNTIHDGDVISLIRKFLVSGIIIDDEYKEAVIGTPQGGNLSPLLGNIILNELDYELESRGLSFTRYADDCLIFVGTEKAANRVMKSVTKYLHEVLKLKVNVSKSQVRKPGGLKFLGFSFTKDARHLYVARPHKISIKKLREKIKYITSRSWSISIKERLTRLKYLYRGWFNYFKYDKMKSLCIQIDGYTRFRLRICIWKQWKTISKKYKSLKQLGINKYKAWEWANSRLGYARVAMSFIMTRTVTNEVIKKKGYLSLESLHSQYIFNLN

SEQ ID NO: 1936 - protein, 429 aa, unidentified
  source 1..429: note = uncultivated organism;MG153-67 reverse transcriptase
MATELLERILSDENLEEARKKVMSNKGASGIDHMTVKELPEYIAGSGTETCDRIRARKWRPMPVRRVQIPKDDGTKRDLGVPAVKDRWIEQAACQVLTPIFEKEFSENSYGFRPGRRAEQAVLKAMGYMNDGYDWIVDLDLSKFFDNVDQDILMILVHNVIKDPDTESLLRRFLQSGVICEGSFQETRTGTAQGSPISPLLANVYLNEFDKEFEARGLRFTRYADDCIICVKSEMAADRVMAKVTAWLEKRLRVKVNATKSKVARPDEIKYLGHSFYHKEGKWRPKPHIKAVRKLEYNLGPLLKRNWGVSMDYRISKINEVIRGWVNYYRQCDMKTILKTIDRWVRLHIRIIYWKQWKTVRNRANHLWKLGMKKYWCWLYANTRSGYYVAGKWLSRWISNRLLRNVGLLSMEEYYLQNHPVSAQLMLVL

SEQ ID NO: 1937 - protein, 441 aa, unidentified
  source 1..441: note = uncultivated organism;MG153-68 reverse transcriptase
MKKSSKEIIVNVEIRKERTSMELLEKVLSDNNIKNAIERVVSNKGASGIDGMKVEELYSYFYEHGEELKEQIRTRKYKPSPVRRVYIPKENGDKRSLGIPVVVDRVIQQAIVQVLSPIYEKQFSENSYGFRPGCSCEMAILKLLEYFNDGYTWIVDIDLEKFFDNVCHDKLIAIIMKTIHDGELVSLIRKYLVSGVMENGVVSPTKVGTPQGGNLSPLLSNIMLNELDKELEKRGLRFTRYADDCIIVVKSEKAANRVMETITRFIEKKLGLKVNMTKSKVARPDQIKYLGFGFYTTKTGIIKPKPHLKSIQKFKRKLKQLTKRSWSISLKNRIIKLNQVIRGWINYFRIADMKSDMTNIGQHLRRRIRCIIWKQWKVPRKRIWAMQKLGADIEQAKAIACSRKSYWNSSMFIGIYITNNKLKQKGLVFPLDHYLKVHTVI

SEQ ID NO: 1938 - protein, 463 aa, unidentified
  source 1..463: note = uncultivated organism;MG153-69 reverse transcriptase
MKEGKQKTEKGCHAEVRTESRGMHGVQTSMGIIENNLVEVPVVEGDLLTHIISPSNMNLAYKRVVSNGGSGGIDGMEVKELLPYLRSHKDELVKKLLDGKYRPNPVRRVEIPKDNGKKRPLGIPTVVDRLVQQSIAQVLQPLYEPQFSPYSFGFRPHRGAHQALLCAQSIINDGNRFCIDLDLEQFFDNVNHSKLIEVISRMINDGRVVSLIHKYLNAGVLVAGKYEETRKGVPQGGPLSPLLSNIMLNELDKKLTKRGHPFVRYADDCMIFCRSERAAERILESISKFIDVKLFLKVNRDKTGTGSVCGKKFLGYSFYFDKDGKCQLRLHPKTIDKLKATLKKLTGRSNGMGYNQRKEALHLFIRGWVEYYKLARMKKTLETIDKWLRRRIRMCIWKSWKNPRTRIANLIKCGVPKWQAYKHGWVKGYWRASCMPDCTHAMSGHNLYRAGYRFLMDYYVLVS

SEQ ID NO: 1939 - protein, 430 aa, unidentified
  source 1..430: note = uncultivated organism;MG153-70 reverse transcriptase
MTHYLYMPMVAMTTVDSYFNRESVLNQAKKVKRKRSHGIDGISAKEALKIAEKEYSSIKTEVLNGTYQPDYILKVNIPKGNGKVRTIGNANTRDRIVQGCIHNYLYDVLDSELSNDNFGFRNNHNCQMAVLRVVDIIQEGYEWIISIDLMDCFTNLNKHLILWLLHNVNVDNRIINSINNIISNKYINGDIIEPVKGCPQGSNISPDLCNMVLNQLDKMLEERGHPFVRYADDIYVFCRSQKAAQRVLKSVKRFLEKKLKLIINEEKTQLFHCKEKVWSCLGFLIKQDVDIHIYMNPKKEEKLRMNIKGLMHNAMPNEMIQRINSLTCGWICCNYIADMGRATKRMDAYIKRSIRGYERRHDVKVDTTKLKSCHGYYKRMLQQVQSKEKESESVGNTNQKQSNNQPRNVDEHDTEVSLSVRAPPKSDSHK

SEQ ID NO: 1940 - protein, 472 aa, unidentified
  source 1..472: note = uncultivated organism;MG153-71 reverse transcriptase
MNVTKDGFKNRQLHIEDYLQMVSAEQKEYAEVFAHQRIAENNDIITDFQTDSLMEKILHKDNLNKAYKKVKSNKGAGGVDGMSVDELLYFLRDNQEQLIQRIKNGKYKPNPVRRVEIPKETKGEFRKLGVPTVVDRVFQQAITQVLSPIYEKQFSENSFGFRPTRSAHDALKQCQTNVNDGYVYVVDMDLEKFFDTVCQSKLIEVLSRTIKDGQVISLIHKYLNAGVISRGMFEKTEVGMPQGGPLSPLLSNIMLNELDKELTRRGHRFVRYADDCMIFCKSKKSAERTLENIVPYIEGKLFLKVNRTKTCVAHISKVKYLGYSFYRYKGKCRFRIHPKSVEKMKNKIRELTDRHNGWGNEYRALKLTQFIRGWVNYFGKADMKRLLQDSDEWLRHRIRAVYWKQWKKTKTKYRKLKELGMDEKFIQWHANMRQGIWNCSNNRMVQFALNNTKLREWGYPTFTEFYLKICEN

SEQ ID NO: 1941 - protein, 474 aa, unidentified
  source 1..474: note = uncultivated organism;MG153-72 reverse transcriptase
MKDQTNEESLDPVPGELPDTAGRPGAASAQHVEKNGAAPVDSDALFRQVLDGANLNLAWKQVKANKGAPGVDGMTIDEFPAFARENWERIRSQLSEGTYHPAAVRRVFIPKPDGSQRPLGVPTVLDRVIQQAIAQVLTPLYDGSFSNHCYGFRSGRNAHQAVQEMEVAWKQKRHYAVDCDLKAFFDTVNHDRLMEQLRRKIGGGKLLRLIGRYLRAGVELPDGSREDTPLGVPQGGPLSPLLANIVLDPLDKELERRGHSFARYADDFLIFVKSAKAAERVMGSVMNYVEKRLGLTVNRTKSKCGKLTDCTFLGFQISARGKVKWSAKAFLRFKQRVREITKRNRGQNVQSVIDELRRYAAGWMNYFGISHTYAEVMDLDEWIRRRVRLYHWKQWQRPRARRRNLIRLGISPGEVHRASRSRKGYWRMSQNSLVCFALNNRYLKERGVPELRDIWIRLHYGDQPKPKGTGKLVT

SEQ ID NO: 1942 - protein, 463 aa, unidentified
  source 1..463: note = uncultivated organism;MG153-73 reverse transcriptase
MKAEYSKNRSCPQRNSAEHEAYVGAQSVGNREVGEQGGADLLERILSRDNLNRAYKQVRANKGAPGIDGMTIEDALPWLREHREELLESIRQGKYKPQPVRRKEIPKPDGGVRKLGIPTVIDRIIQQAIAQQLVPIYEPLFSDDSYGYRPGRSGQQAIRKVKWYAEQGYTSAVLVDLSKYFDTLNHELLMNLLRKNIHDKRVIELIKRYLKAGVMENGLLVKTAEGSPQGGPLSPLLANIYLNEYDREMASRGVPVIRYADDIVVLAKSPRAAQRLLESTQRYLEGKLKLKMNVEKSKVVSVYSIRNFKFLGFALGKGKNGVYIRVHTKTLKKAKAKLKELTSRSQGRNVRKVMENVKVYIRGWLGYFGIASMKTTMQEWDGWLRRRFRMYIWKQWKKPRTRVKNLMILGMPEWQAHRNGNTRKGYWAVAGSGILTHTITNKRLAQAGYYSILDRYESLHSCD

SEQ ID NO: 1943 - protein, 420 aa, unidentified
  source 1..420: note = uncultivated organism;MG153-74 reverse transcriptase
MKLMDEVLSKDNLNQAYLQVTRNKGASGVDDMTCEEVKDYLKVHGDELISQIKSREYKPLPVRRVEIPKPNGGVRKLGIPTVIDRIIQQALVQKLTPIFEPTFSEYSYGFRPNRRCQNAIDKALELLNQGYEWIIDLDLEKFFDNVPQDKLIRLVDNMVNDSDITALIHKYLKAGVLINGEFEETTIGTPQGGNLSPLLSNIYLNELDKELERRGLHFARYADDCVIFVKTENAAKRVMFHIVKFIETKLKLKVNAEKTHITRPNNLKYLGFSFWKDKEEWKSKPHKESFVKLFLKLKKLVKRSWSIDLDYRIKKINEVLRGWINYYRQSSMKRKLVKISGWLRNAVRVIIWKQWKLPCARRKALIKLGLSENEAKCVSNSRKGYQHICHCWSITKAISNSRLKKRGLLDPLEYYLKPIA

SEQ ID NO: 1944 - protein, 474 aa, unidentified
  source 1..474: note = uncultivated organism;MG153-75 reverse transcriptase
MITENLRMGCPQMDSTECEEYAEALSIYLPEDIERETRLNTEHLMEEVISIPNMIRAMKRVKRNKGAAGVDGMEIPEAMDWLQAHFAEVQEELAGGYYHPSSVRRRVIPKPDGGERKLGIPTVKDRVVQQAIAQILVPLYEPQFAENSYGYRPGRSGQQAIMKVKEYAEEGYVWAVVLDLSKYFDTLNHDRLIRELRRTIKDEKVMIAIKKFLKAGVMENGVVIETREGSPQGGNLSPLLANVYLNEFDCTYAERGVPEIRYADDIVLLAKSQRAAERILAGSIAMLEGKLHLKVNRDKSRIVNLANNKGQFKYLGFGMYKGRDGFKIVPHVKSRKKFKKKLKAMTNRKRAGKFEDICMELKRVINGWMNYYGIAEMKTWAKEMDGWLRTRMRMIIWKRWKNPRTKYRKLKGLGIPPEYAYMAANTRKGPARAVRLTTVLRALSNRKLEAWGYPSISRSFEHKHQSVVQLRFAF

SEQ ID NO: 1945 - protein, 426 aa, unidentified
  source 1..426: note = uncultivated organism;MG153-76 reverse transcriptase
MPEDKPREATLETVLAAANLWAAWRAVKANGGAPGVDQMDMERSARHLRAHWEAIRSKLLAGAYVPGAVRVVSIPKANGGERQLGIPNITDRVIQQAIHQVLSPVWEPVFSAHSHGFRPGRSAHDAVKAAQAFVKAGKTWVVDIDLKSFFDRIDHDKLMHLLRGRIEDQRLRALIGAYLRAPMQHRDGRKEKRWKGAPQGGPLSPLLANIALDPLDKELEKRGVSFVRYADDIAIFASSARSAERIYASVVAWIERHLKLEVNREKSGTGPSGKSSLLGFRVHEDGNVEVSPKAIAKLKEKVREHWDARQSLTSERLRAQWQDYIRGWWNYFQLANWRREVVRLSGWIRRHMRKCFWLRWKTPRGRVNALKKLGVTGRALGQGSSTRGAWPMALHPTVQQALSNRALARYGFIIPWQVAAAPGTGR

SEQ ID NO: 1946 - protein, 488 aa, unidentified
  source 1..488: note = uncultivated organism;MG153-77 reverse transcriptase
MSNSNLIVETSNCKDTKDISDKSNTPTYDHVTLENILSHGNLTLARISVEINKGAPGIDKMTTDTLRRYLEIYGDELEKQIRTGKYKPLAIKRVYIPKENGQKRPLGIPTVIDRYVQQAVTQVLSEAYEPHFSDSSYGYRPGRSARQAVKQLTQYVNCGYTHVIDLDLSKFFDTVNHSKLLQILSSKIKDGRVISLIHKFLKAPVQEDGQIGPNTRIGTPQGGCISPILANILLNELDQLLDRRGIKFLRYADDMCIFAKSERAAKRILDNVTRFIEKKLFLKVNQDKTKICEVGPEVQFLGFSLKRVYKNFKKGIVPEKCKWYPSVSQKKLDKFKQKVKELLDRKAPGGVLNTMNRYNRFIRGWHNYYRGALGQYWLQRTCMLIRRRIRQLYWKQWKTAQNRFKNARERWSKAPEIGDKSKRAIPYSSSRYWRMSKSYALNKILGNKQIEAEGWLSLETMDKMHWDKLASEKCNGTAVDARPARPVV

SEQ ID NO: 1947 - protein, 443 aa, unidentified
  source 1..443: note = uncultivated organism;MG153-78 reverse transcriptase
MKTSVEGQPPEVPARDKQGGEIRARWAWVEPQVWTERMLTALETGVKGNQWFSLMDKVYRLDTLGIGWEQVQANAGGSGVDGITVERFAKDCPRGLLVLNEQLRQGSYRPHPVKRCWIPKLGTKQTRPLGIPTVRDRIVQSALRLVIEPIFERDFAEQSYGFRPGRGCKDALRRVQQLLDEGCTWIVDADLKRYFDTIPHEGLMAKVGERIADGRVLDLIKSYLKQGVLDGLSAYEAGEEGTPQGAVMSPLLANIYLNPLDQQMVRQGYEMVRYADDFVILCRSEEAAQAALREVQAWVQANGLTLHPEKTRLVDMMQPGGFDFLGYHFERGHRWPRKKSLMKLKDTIRALTPRTSGQSLDSSIKKLNQTLRGWYGYFKHGHRSRFERIDQYTRGRLRAILRRRSRRRGRSRGHDHQKWSIHYFTAAGLFSLVQADLATRRSP

SEQ ID NO: 1948 - protein, 467 aa, unidentified
  source 1..467: note = uncultivated organism;MG153-79 reverse transcriptase
MQNTGHRSGSGCPPEDRMEAEGLPGAQSADKAKEEERGGAGNSLIVQVARKSSLLAAYKKVRANRGAPGIDGMTVDAARGYLNEHWREIAESLINGTYKPQPVRRVNIPKPDGGTRALGIPCVVDRVVAQSLAQALEPIFEPGFSDSSYGFRPGRSAHQAISKAKEYVQEGYTRVVDIDLAKYFDTINHDILMDMVMDKVKDRKAIKLIRAFLKGGAMEGGLLSETDEGSPQGSPLSPILSNVYLTRFDQWLEARGHRFVRYADDCNIYLKSQRAAERVMANSVEFLEGKRMKLTVNREKSQIGSPFRLKFLGFSMYRLNGKAAIRIHAKTINRLKQKIRAITKRNRGRSFDAIAAELKQYTDGWLNYYGIADSRSVIGMINKWIRRRLRMYIWKQWKTVKKRHKSLLALGATKQEAWKWANTSKSYWRTSGSQILQTTITNEILERRGYSDMLKKYDSVHLKFRTA

SEQ ID NO: 1949 - protein, 470 aa, unidentified
  source 1..470: note = uncultivated organism;MG153-80 reverse transcriptase
MNVTKTGAKCSQLRKEGSTQKDSAEHEGYAGVHIPERITETDEANTSKSMEKLLEKIVSRDNLNEAFKRVKANKGSHGYDGMGVDELLHYLKENGETIKQQILDGKYRPNPVRRVEIPKENGKKRNLGIPTVVDRFVQQAIAQVLTPIYEKQFSENSYGFRPKRKAHDAIRKSQENIDGGYRFVVDMDLEKYFDTVNQSKLIEVLSRTIKDGRVLSLIHKFLKAGVVVKHKFEETELGVPQGGNLSPILSNIMLNELDKELQKRGHRFVRYADDMLIFCKSRRSAERTLANILPFIEQKLFLKVNREKTVVDDARKVKFLGFSFYSRKGQTKVRIHPKSIAKMKAKVKELTSRSNGMGNEERVMKLKRYITGWINYFKIADMKKLLQTTDEWMRRRIRMIFWKQWKRVRTRFDRLKSLGIHEQKAWEYANTRKSYWRTSKSPILSKSLNNTTIKGLGFLFFSDYYRQVNV

SEQ ID NO: 1950 - protein, 441 aa, unidentified
  source 1..441: note = uncultivated organism;MG153-81 reverse transcriptase
MLDSEEMEMTDMKTEKSLLDDMLSKENLNRAYQQVVRNKGAEGVDGMKYTELKDYLKEHGDEIKEQIRNRKYKPSPVRRVEIPKESGGTRSLGIPTVVDRFIQQAIAQVLTPIYEPLFSENSYGFRPNRCCEMAIQKVLEYMNDGFQWVVDIDIEKFFDHVNHDKLITLVMKHVKDGEIVSLIRKYLKSGIMMDDEYKESVIGFAQGGNLSPLLSNIMLNELDKELEARGLNYARYADDCLILVGSQKAADRVMENVSKFIEKKLGLKVNMTKSKVTKPNDIKYLGFGFFRDNRSKLWKAKPHQKSVEKLKKKLKQLTSRSWGVDMDHRLRRIKQVLRGWVNYFRIGKFKEICGRIDRNLRYRLRMCIWKQWKTVGRRYKALRQLGMEKETAWKWANSRKGYARVASSPILTYTVTNKRLAKRGLASMTDLYQKINKTCLA

SEQ ID NO: 1951 - protein, 451 aa, unidentified
  source 1..451: note = uncultivated organism;MG153-82 reverse transcriptase
MVQKSRQLELPLESRGEAPRVERSGQTESATSGNARPGMDLLLEKALERPNLLQALKRVQQNRGSPGSDGMTVDELPDHLRANWPTLREQLLTGRYQPRPVRRCEIPKPDGGKRELGIPTVLDRFVQQALLQVLQPLFDGSFSEHSYGFRPGRRAHDAVCEARGYVQSGKRWVVDVDLEKFFDRVNHDVLMSRLARRITDKRMLSLIRRYLTAGVLADGVVVERYEGTPQGGPLSPLLANVLLDEVDQELERRGHTFVRYADDLRVYVGSLRAGQRVMDSLIRLFGKLRLKVNHAKSAVARAWDRPFLGFAFWAARGGRVAIRIAAKSIAKMKVRVRQLTRRVRGRSLDQIAVELRRYLLGWKGYFGLAETPGVLRDLDEWIRHRLRAVQLKHWKRGRTIYRELVVRGMAPTKAKQVAINARSWWRNSALGIHSALPNSLFDELGVPRLAS

SEQ ID NO: 1952 - protein, 472 aa, unidentified
  source 1..472: note = uncultivated organism;MG153-83 reverse transcriptase
MNVTEIGTKESRKHYSDNDYCQKNSTEYEGYDRVLTEKRITENNNTDADSEVNGLLERILEPENLNRAFKQVKKNKGSHGVDKMEVEYLLQHLKDNGEELRQSILKGKYRPMPVRRVEIPKDNGKKRQLGIPTVIDRMVQQAIQQILTPMYEPTFSETSYGFRPRRSAHDALKKCKEYANEGFTYVVDMDLEKFFDTVSQSKMIQILSRTIKDGRVISLIHKYLRAGAIVDSKYEETTVGLVQGGPLSPLGSNVMLNELDKELEKRGIRFVRYADDMLLFAKSKRSATRILEHILPYIEGKLKLRVNREKTSVAYIGRIKFLGYGFYPAKGGIKLRVHGKSKKKMKNRIREITSRRQGISYEELKLKLKQYVVGWVNYFKLANMKKLLISIDQWLRRRLRMFIWKRWKKVKTRYKRLKQLGYNHSDAIKYANTRKGYWQVAGSQILGCSITDNRLRKQGYQFFSDYYKTVSA

SEQ ID NO: 1953 - protein, 468 aa, unidentified
  source 1..468: note = uncultivated organism;MG153-84 reverse transcriptase
MKGRMQKITMSSGSRPQKDSTECESYEGVQTFMDMTENNLKEVQFERGNLLEFILSPYNLNQAYLQVKRNHGSCGVDGLSTEELSGYLKRHKDELVESLKSGKYRPNPVLRVEIPKENGKTRPLGIPTVVDRVIQQAISQILSPIYERQFSDNSYGFRPHRSCHKALKRAQEYITQGYKYSVSLDLERFFDTVNHAMLIRLLSRTIRDGRVISLIHKYLTAGVMVRCGYEESVEGIPQGGPLSPLLANIMLNELDKELVRREHKFVRYADDCMILCRSKRAAERVCDSISTYIESRLHLKVNRDKTKVAYVGRVKYLGYSFYMMNGKCRLRLHPKSVTKMKARLKELTSRSSGWGYAKLKDKLNQFINGWMNYFKMADMRNVLEQTDKWLRHRIRSYVWKSWKKVGTKFKNLMKCGIDRWLAWQWANTRGGYWNTAGSPILSRVISTERLKLQGYPCLVDLYVKLHQH

SEQ ID NO: 1954 - protein, 465 aa, unidentified
  source 1..465: note = uncultivated organism;MG153-85 reverse transcriptase
MIDDKAEAREAGAKGQEAGQYPVGRPCGAESITAAAGQTKAEVSRLMEAVIESSNVWSAYQKVVRNGGAPGVDGLTVGSFKDWLKKHWPRVRAALLDGSYLPSAVRAVDIPKPSGGVRTLGIPTVLDRLIQQALLQVLQPIVEPTFSASSYGFRPGRSAHQALRAAKHYVQEGRAWVVDMDLEKFFDRVNHDILMSRVARHVDDARVLKLIRRYLEAGLMRDGVETARDQGTPQGGPLSPLLSNILLTDWDRELEKRGHAFCRYADDCNIYVRSEAAGQRVMAAMKVFLEERLKLQVNDAKSACARPWKRKFLGYTLTNAGGWIRLKVAQESVMRLTGRVRELMRQGRGRSLTHTIETLNPVLRGWIGYFQLSESKTVWKDLDGWLRRRLRCLLWRQAKTRQRRTALLRKQGLSEARAWHSGHNGQGPWWNSGASHMNQAFPKAFFDRLRLVSMIDTSRYLQCHS

SEQ ID NO: 1955 - protein, 427 aa, unidentified
  source 1..427: note = uncultivated organism;MG153-86 reverse transcriptase
MSELLEKILSNDNMNAAYKRVCARKGAGGVDEVTVEELGDYIKENWESIREQIRRREYKPQPVRRVEIPKVGGGVRKLGIPTVMDRVIQQGVVQVISPMCEPLFSEWSYGFRPDRSCEMAVRQLLVYLNEGYEWIVDIDLEKFFDNVPQDRLMSLVHDIINDGDTESLIRKYLKAGVMTPQGYEETKLGTPQGGNLSPLLSNIMLNELDKELEARGLRFTRYADDCVIAVRSESSAKRVMRTVTDWIQRKLGLKVNMTKTHITRPQKLKYLGFGFYKDSKAKEWKCRPHQESVKKFKCRLKELTCRKMPGTVTGRIEKINQVTRGWINYYALGSMKKAMTEIDAHLRTRLRIIIWKQWKVPKKRQWGLQKLGVNKDLARLTAYCGDRYYWVATKTCFSRAVSKKVLAKAGLISCLDYYSERHALKLC

SEQ ID NO: 1956 - protein, 471 aa, unidentified
  source 1..471: note = uncultivated organism;MG153-87 reverse transcriptase
MKGRMQKISTQSDSRPRKDRPEAESYEGVQTYMDVVDGCLTTEQPKTEYPLLEQILSSANLNAAYLQVKRNGGAAGVDKMDCDRLLGYLIEHGEELKERIRQRTYRPNPVRRVEIPKDNGGKRQLGIPTVVDRMFQQAIARVLSPIYERQFSEGSYGFRPKRGGKRALIAATKIVERGYHYAVDIDLERFFDTVNHAKLIEILQRTVKDDAVISLIHRYLNAGVMKDGKYEPSEEGTPQGGPLSPLLANIMLNELDKELEKRGHPFVRYADDGLIFSRSKRAAERVRESISKFIEGHLKLKVNREKTEVAYIGRLKYLGYGFYVRNGKCRLRLHKKSEAKLRRRLKAITSRSNGMGYGKRKDALRQYLRGWTEYYSLADMGNKVKEIDQWLRRRIRMCIWKSWKRIKTRVCNLIRCGIDKRKAYEWGNTSKGYWRIADSWILTRALPTDRLHTAGYDWIGCYYTASSLPKG

SEQ ID NO: 1957 - protein, 437 aa, unidentified
  source 1..437: note = uncultivated organism;MG153-88 reverse transcriptase
MRLSDLILESSNMEKAIRKVVSNRGSAGIDDMPVDEIRAWMEVNGDELAEQIREMKYKPSPVRRAYIPKPNGKKRPLGIPTVVDRVVQQATYQILYPIFDSTFSDSSFGFREGRSAHQAIERTLEYLNEGYEWVVDLDIEKFFDMVNHDKLISIIRLKVNEKETLHLIRSFLKAGVMEEGKLNRNDLGTPQGGNISPLLANIYLDVFDKELENRGLRFVRYADDVTIYCRSEMAANRVMRSVSSWLERKLFLKVSPTKTHVVRPPESTFLGFTFWKGRDGWKCKPANDRKQRLYKNMKELLCRRKAAAMPLSYLFTKVNQKVRGWINYFSIGSMKRFLIEFGQWLRHKIRVVIFKQWKRPKTLFKNLMILNKQFKTGFSKEEIRQTANSRLGLWRTTGWRTVNFILSPKVLALPNKEKERPGLIDPVGYYLNLQNKS

SEQ ID NO: 1958 - protein, 413 aa, unidentified
  source 1..413: note = uncultivated organism;MG153-89 reverse transcriptase
MISLEKVLSPQNMLLACKRVRANKGAPGVDGMTVDELEGHFRRHWASICAHIREGRYIPSPVKRVDIPKPDGGTRMLGIPTVQDRLIQQAIAQVLVEHFDPTFSEFSYGFRPGRSAHQAIEQTQRYIAGGCSWIVEMDLAKFFDTVNHDRLMSTLERSCRDKMLIRLIRRYLRTGILADGLVTPRDEGTPQGSPLSPILSLIVLDELDKYLEKRGVKFCRYADDCNIYVGSERAGKRVLENTIKFIEETLKLRVNRDKSGVFRPRRAKFLGYTFVGTTGQPLVHPKSFKRLKDKLRTVFHRARGGSLFQTIGELNAILRGWRQYCRLDNRKDVFEALDIHIRRYLRKLVWIAWKRPRTRERELRRHGLDGFRAWKSANNGRGAWWNVGALHMRDAFPKSFFRRQGLYSLLEMR

SEQ ID NO: 1959 - protein, 444 aa, unidentified
  source 1..444: note = uncultivated organism;MG153-90 reverse transcriptase
MNNSDPSMNPDGGDAVWRSDREPALDNLMARILERDNVRKAWQRVKSNKGAPGSDGMSLEDFPTYAREHWQEIRQSLLDGSYQPRPVRRVVIPKPRDKGERKLGVPCVIDRVIQQAILQVLTPMFDPAFSESSYGSRPHRSAHGAIQQVKTIVKAGHRIAVDLDLEKFFDTVNHDVLMSRVARNVPDKVLLGLIGRYLRAGVLVGETIEPTSWGTPQGSPLSPLLSNILLDDLDKELEARGHRFVRYVDDLVILVKSRRAGRRVMAKISRYLTQTLKLKVNREKSRVVKIEDLNYLGFTFRGIRIFASDQALQDFKHRLRGLTSRSWGVSMSERFERLNRYLRGWMNYFGISQHYTPIEELDGWLRRRIRMCYWKQWRRPRTRIANLLKLGTSKRHAILTGISRKGFWRLSKTLATQTGMTNEWLEQQGLLSIRKLWMKVQGYV

SEQ ID NO: 1960 - protein, 462 aa, unidentified
  source 1..462: note = uncultivated organism;MG153-91 reverse transcriptase
MHREQKIGKSGYSCEGTVEPESNKRARSVAGLEAEEKNGAYSLLEEILHRDNLNAAYKRVKQNGGAAGIDKMTVHEMLPYLREHGGELIASIRGGWYKPKPVRRVEIPKPDGGVRLLGVPTVIDRMVQQAITQVLQPIFEATFSDSSYGFRPGRGAHQAIVKAKEYYEEGYTSVVDIDLARYFDTVNHDILLGLISREIQDKTVVRLIRKFLKSGVMANGLYSPTEEGTPQGGNLSPLLSNIYLTEFDRMLESRGHKFVRYADDSNIYVKSRRAAERVMESCTKFLEGKLRLKVNRDKSKTGSPLRGKFLGFSLYKIKGKTGIRPHQKSLRRLKRNIKKLTSRKQAKSAEGILVVLKRYTTGWLGYYSIADMKSKIQEINEWMRRRIRQIFWKQWKKIRMKHDNLRRLGIPDKKAWEWANSRLGYWRIAGSWILTRSLTNEYLASIGYDDIAKRYEALHLNY

SEQ ID NO: 1961 - protein, 469 aa, unidentified
  source 1..469: note = uncultivated organism;MG153-92 reverse transcriptase
MNVTNDGFKDRQRHIEDYLQMVPAEQGENAGVSVYQRIIENNNTITDFWTDNLLELILRTENLNMAYRKVKSNKGTGGIDGMQVDELLPYLKENQTFLIQQIRDGKYKPNPVRRVEIPKEEKGTRKLGIPTVVDRVIQQAISQELTPIFEEQFTDNSFGFRPRRSQHDALRRCQEYVEEGYEYVVSLDLEKYFDTINHSKLIEVLSRTIKDGKVISLIHKYLNAGILQNGMFEETESGVPQGGPLSPLLSNVMLNELDKELERRGHKYVRFADDCLIFCKSRKSAERTLKNIVPYIETKLFLRINQEKTEISHISGIKFLGYAFYQSKGRCRLRVHPKSVRKMKDKLKKLLEKGNGWGNDYRKQRLKDFITGWVNYFSLADMKKLMQVTDRWIRRKIRAIYWKQWKKVKTRYRMLKSLKLPEYRVHELANSRKGYWRMAKVLNVALTNKLLAKLGYKSMLDHYLKICEN

SEQ ID NO: 1962 - protein, 438 aa, unidentified
  source 1..438: note = uncultivated organism;MG153-93 reverse transcriptase
MIEKVLHQGNLLQAYRQVLANKGSAGVDGMPVNELAAHLRVNRDALASAILGGQYLPQPILGVEIPKSNGQKRLLGIPTVTDRLLQQAVDQTIAPLFELEFKAHSYGFRPNRNAQQAVLQAQKHINAGYQHIVDIDLKSFFDEVDHCLLLQLIYRKVKCPLTLRLIRKWLRAPILVGGKLTKRRKGVPQGSPLSPLLSNILLHELDKELERQGLLYVRYADDFSIYTQSESEARQIGNSLYLFLKNKLRLPINREKSGIRRPADFELLGYRFVPTYRKGDKGKYQLVVAEKAWVRLKQNLKELTRKTTPSAFAERIEQLKEVQRGWVNYFRLASMQEKLKQVDSWLRNRLRHCIWHDWKKPERKRKNLIQLGVSKHEAYAWSQTRKGGWAVAQSPILVTTITLKRLVKKGYESLFDYYKQVSPQLNEPLYTRPVRTVV

SEQ ID NO: 1963 - protein, 438 aa, unidentified
  source 1..438: note = uncultivated organism;MG153-94 reverse transcriptase
MNRSVPAATRSRDEPEAGERSEPESIPNATLLARVLARENLQRALKQVRQNRGAPGIDGMTVDELPSYLRHHWLEIRAQLEAGTYCPQPVRRVEIPKPDGRKRLLGIPTVLDRFIQQSIAQVVSAQWEPHFHPRSYGFRPQRSAHQALRQLQTDIRDGKRWVVDLDLEAFFDRVNHDRLVSRLRRHVPDAALLRLINRFLKAGVRVGHATEATTRGVPQGGPLSPVLANVVLDELDWELERRGHRFVRYADDCNIVVGSQHAGERVKASVTRFIATTLRLSVNANKSAVDRPWNRKFLGFTITSKGTRLKVADAAIDNLKHRVRELTRRTRGHRLTDVIAQLREALLGCKAYFGVAEVQSPLREIDKWLRRKLRCYTWKQWGRAGYRGLRRRGVSVREAWNTSKSAHGPWRLSRTPALAQALPARYFSTLGLPTLAAA

SEQ ID NO: 1964 - protein, 432 aa, unidentified
  source 1..432: note = uncultivated organism;MG153-95 reverse transcriptase
MNTSKQQEGGVKSRVWYSLYDRLLHADALSAAFRKVKSSNGAPGIDGQSCKGFALNQTEEIAKLLSELRTKTYRPSPVKRVELVKEDGSIRLIGIPTVRDRVVQQVLKRAIEPIFEPQFHDGSYGYRPKRSPQKAVAHAIELMRERGLEQVVDMDLSKCFDRLDHDLILKAVKRSITDGSILALIRMFLESGVMKYGELSPTEIGSPQGGVISPLLANIYLNDFDQTMKSRGHEVVRYADDILIFKGSRKGAEHALKVATEVLEKELKLTVNQRKTHLANLDEGVAFLSFVIYQSYTLIKESKVDGLKAKLKLATRRNTPVNLEKVIRDINPILRGFVNYFKLANCKTVLRNVMSWLRRRLRALQMKLWKTPAKLHRKLRQLGYKGEFKQIKMASWKNAACQQAHMAMPNAWFKEIGLYHPPQLETGQLTLI

SEQ ID NO: 1965 - protein, 465 aa, unidentified
  source 1..465: note = uncultivated organism;MG153-96 reverse transcriptase
MLKAEYRKGCLQMDSAEHKEYAGAQSAEARERREQDGAKDLLEAILDKRTLFEAFKRVKANHGAPGIDGMTVDEVLPWLQEHVEELRQSIRDGKYKPYPVRRVMIPKPDGNGERKLGIPTVIDRIIQQAIALKLTPIFEPLFADESYGYRPGRNCQMAMMRVKQCVDEGYIHVAEVDLSKYFDTLNHELLMNLLHRQIQDKQVTELIKRYLKSGVMENGVVTETEEGSPQGGPLSPLLANIYLNEYDQEMKRRGVAIVRYADDIVVLAKSQRAAERLLESSRKFLEDKLKLKLNQDKSRAISIYSKKFKFLGYAMGKNKNGNYIRAHKSSLKKAKQKLKEKTKRNRGKNVREVMKAVKDYIIGWLNHYHIASIKNTLIEWDGWLRRRFRMYIWKQWKKPRTRVESLRKLGIPSWQAYQWGNSRLGFWRVAGSPVLTRSITNEKLVQAGYFGILKQYERLRKHLSD

SEQ ID NO: 1966 - protein, 422 aa, unidentified
  source 1..422: note = uncultivated organism;MG153-97 reverse transcriptase
MLEKILNRRNIERAIKAVERNHGAGGVDDRQSDELRPFVNASCQSLVNRVREGGYQPSPVRKVEIPKDTGGVRMLGIPTVLDRMLQQAIYQVLSPIYEEAFDKHSYGFRPRKNAHQAVFTAQGYLNEGNSWIIELDLEKFFDKVNHQKLMHLLSQKVKDKSTLLLINSYLKTGIMEGGVVSQRIEGTPQGSPLSPLLSNIMLHELDQELNKRGHKFVRYADDCSIYVKSKKSAIRVAKSITKFIECNLLLKVNREKTKISRAHESYLLGFSFYQTKGRYEIRISPKSVNRVKAKCKLITRSSDPKSETVKLTKLDSIIRGWVNYFKIANAKSIMEKLDEMIRTRLRISTWRRWKRIGTKITNLLKLGIEKSRAYMWGNTSKGACRVAHSPILKRTLEIKYFRKRGYIGFYNYWQAERQPLLF

SEQ ID NO: 1967 - protein, 459 aa, unidentified
  source 1..459: note = uncultivated organism;MG153-98 reverse transcriptase
MSGTRQKIQVPLAFPTAQRSEAPKRVREGTEPPTATRPPERPARTDRVMEEGVERANLKAALQRVKANKGSPGIDGMTVQQVPGYLAAHWPALREQLLRGTYQPQPVKRVEIEKPGGGVRKLGVPTVLDRFLQQAVLQVLQRDWDRTFSPHSYGFRPHRSAHKAVAQAQQYLADGCGWVVDLDVEKFFDRVNHDQRMGQGAKRITDQRMLRLLRAFLTAGVLADGLVSPTEEGTPQGGPLSPLLSNLVLDTLDREVERRGHRFVRYADDCNIYVRSQRAGQRVMASLTRFITTTLKLKVNSAKSAVAPPGERTFLGFSFTRTPQPKRRLAPSTVTRGKARVRELTRRTRGVSLERMVRQLRSYLQGWRNYFGFCQTPSVLTHLDEWIRRRLRSVAWKQWKRGRTRFAELRRRGVGLALATTTAGSAHGPWRLSHSRALDLALPKAFFATLGLPELAAGR

SEQ ID NO: 1968 - protein, 468 aa, unidentified
  source 1..468: note = uncultivated organism;MG153-99 reverse transcriptase
MSKKNEPSKTSANAVQTELFTGRLDSGLPKGGGTSRRDQRMELFSRLEEQRTLTKSTMDSVSDTLHLLHAFKRVRENGGSAGIDGVTPNDYAQNLALRINSLQQRLDSGTYEPSAVRGVEIEKPTGGTRLLGIPTVEDRIVQQSIQNELQRIFDPYFSENSFGFRPGRSAHQAIERASDYVKEGKIWVVDIDLKSFFDQINHDRLMNRLRNSISDKRLLKLIHKFLRAGLMKGGLETQRMSGTPQGGPLSPLLSNIVLDELDKELEARGLSFVRYADDCNILVSSERSAHRVFESMVAFIEGKLKLKVNLEKSGVRRCDEVKFLGHTVMGDGKIRIADKSIERFKKKIREVTKRNRAIPLGRLISETNLIIQGWATYFRKCNTWLSGLKEMDGWIRNRIRCYALKSHGRRYPTYCFLRSLGVETKRSWNAVKFHGWWSMANLNYVRNGMGLAWFAGLGLRSLVVVQKG

SEQ ID NO: 1969 - protein, 437 aa, unidentified
  source 1..437: note = uncultivated organism;MG153-100 reverse transcriptase
MSATNRTGNNKDESHKPTKLMEQIVSKENMTRAYKRVFSNKGVSGVDGLEVPELKDYLKQHWSTIKEALLAGEYYPQPVMQVLIPKPGGGERLLGIPTVIDRMIQQGIHQILNPLYDPGFSDWSYGFREGCNAQQAVAQSQIHIRSGKRWVVDMDLSKFFDEVPHDRLLSKLRKKVMDRRVIHLIDRYLRSGIMRYGVEEQRTKGTPQGSPLSPMLSNIVLNELDKELEKRGHRFVRYADDFQIYVGSKRTAERVMESLTEFIERKLKLKVNKTKSAIGRPWKRSFLGYSFTSQKESKLRVSPESIKRFKGKLKEKFRLGRGRNQQDFIVKDLNPLLRGWISYFSRSEVKGFAEILDGWVRRHLRKIKWLQMKRSWTRLQTLMKRGLSEDRAVQSCFNQRGSWWNSGASHMNKAYPRSYFDQLGLICLQNKLSGYHL

SEQ ID NO: 1970 - protein, 415 aa, unidentified
  source 1..415: note = uncultivated organism;MG153-101 reverse transcriptase
MKLALERGVTTMDLMNVVLSQDNIHRAYLKVKANKGASGVDNQSVDELGDYLKINGDKVINDIRTKRYFPKPVKRVYIPKANGRKRPLGISTVLDRMIQQAVAQPITDIYERVFSDYSFGFRPGRSCHDATKQALEYLNGGYEWVIDIDIEQFFDKVNHDKLIQVLREQVNDSDVLNLIRKYLKAGVMEKGLEKATKTGVPQGGPISVILSNVYLHELDKELESRGLRFVRYADDVLIFTRSEMAANRVMTSISSWLERKLFLKVNATKSKVCRPTRSKYLGFTFLKHGGQWKVKPTSKSKARLYEKMREYLKRNRAVARPLSVTFKKVNSVVRGWINYYRIGMMKGLMKINMKYRSGFSHEDIFKVANSRLGWYKRCGQSVVNFVLNPKLLEAKIKDRVGLLNPLDYYLRKVGI

SEQ ID NO: 1971 - protein, 470 aa, unidentified
  source 1..470: note = uncultivated organism;MG153-102 reverse transcriptase
MNVTKQKYKGRKFHNENCPQKVAAEQRGYAGVPASVRIAETSDIITDLPTDSLLKRIISRDNMNTAYFKVKSNRGAGGVDKMSVDELLPYLREHRLSLLQQIRDGKYKPNPVRRVEIPKEERGKTRKLGIPTVVDRVIQQAIAQILTPIYEPQFSEASFGFRPKRGAHDALKTCQRYADEGYVYVVDMDLEKFFDTVCQSKLIEILSRSIKDGRVISLIHKYLNAGVIRQGVFERSEQGVPQGGPLSPLLSNVMLNELDKELERRGHKFVRYADDCMILCKSRRSAERTLASIIPFIEKKLFLKVNREKTSVAHISKVKYLGYGFYRYKGKCRFKVHKKSLAKMKKRLRAITNRSKAISNEERPLILKRFVKGWVNYFKLADMKNMLRQLDEWLWRRIRAIYWKQWKKVKTRCRMIRRYNLPDWKVHELANCRKGIWRAALMLNQILTNKEIARQGYISLTSYYEQVCEN

SEQ ID NO: 1972 - protein, 467 aa, unidentified
  source 1..467: note = uncultivated organism;MG153-103 reverse transcriptase
MKGRKQKTPKNIGGYHQEVGAEHRGNDGVPTFVWITENNEVTPPLEDGLLGKILNPFNLNRAYLKVVRNKGSHGIDKMEVGVLRDYLRHHGSELITSINSGSYHPKPVRRVEIPKDKTSKRPLGIPTVVDRFIQQAVHQVLSPIYENQFSDNSFGFRPKRSTHKALHRCKRFISEGNKYAIDMDMEKFFDTVNHSKLIEILSRTIDDSRVLSLIHKYLNAGVVVEHKFEATERGVPQGGPLSPLLSNIILNELDKDLTRRGHRFVRYADDMVILCKSRRGAERVKESVIRFIEQRLFLKVNREKTQVVHFSRIKFLGYSFYNKKGEVRFRIHPKSIAKLRDKIRVLTSRSNGWGYSVRKERLSAFIKGWVNYFRYTDIKNLLIKIDEWYRRRLRMVIWKQWKLVRTRSRNLTKLGIPKRKAWEWANTRKGYWHVSNSYILSRSITNKNLSSAGYLFFTDYYLKVRVI

SEQ ID NO: 1973 - protein, 459 aa, unidentified
  source 1..459: note = uncultivated organism;MG153-104 reverse transcriptase
MRQKTQYELAFPTATKGEAPSAEGEGTEARAARADAERRTAVVGPSMEAVVERGNLKKALAQVRRNKGAPGGDAMSVDELVHHLKDHWPTIRAQLLEGTYRPQPVRRVEIPKASGGTRPLGIPTVLDRFIQQAVLQVLQAGWDPTFSEHSFGFRPGRSAHQAVARAQEYIADGHRWVVDLDLEKFFDRVNHDLLMGLVAQRVSDRRILKLIRGFLTAGVLADGLVGPTDEGTPQGGPLSPLLSNLMLDVLDRELEGRGHRFVRYADDCNIYVRSRRAGERVMASVERFLARRLKLKVNRTKSAVARPSARKFLGFSFTNREQPRRRIAPQALARFKSRVRELTQRTRSASLGRIAEDLSRYLIGWRGYFGFCQTPSVLQRLDEWIRRRLRAIAWKQWRRGPRRFAELRRRGVGKDLAAQTAGGTHGPWRISNSPALTIALPLAFFASLALASVAATIAV

SEQ ID NO: 1974 - protein, 447 aa, unidentified
  source 1..447: note = uncultivated organism;MG153-105 reverse transcriptase
MKKKPTMKSKMRQLNLFVDERSLFEKLCDPINLGAGFKAVKKNGGSPGIDGVTIKEFDNRLKEELVQLERDIESWNYKPSPVRRVEIPKPGKGKGVRLLGVPCTRDRVVQATIKLLLEPILDPTFSNHSYGFRPGYNQWQAVESAQRIVKSGKEYVVDIDLSKFFDRVNHDRLIYLLSGHIDDKQILRLIGMILRSGIMKDGMVTPSEEGTPQGSPLSPLLSNVVLDELDKELERRGLEFCRFADDCNIFVRTPKSAERVMRSIGKFIERKLKLRINRDKSKVGRSREVKFLGMTIIDGAVVISAQSMKRALEKVKELTPRGTHLSLSETMKRINSWYIGWSGYYRMTQYPSQLRAIEAHIRRRLRSRIVDQHTRRRHLFKKLIKRGVTRRRARTVFSNKGRWVLSNIFALTEAFPVRWFLDQAGQKIRSDDRLRHWFPIHLWIKVT

SEQ ID NO: 1975 - protein, 463 aa, unidentified
  source 1..463: note = uncultivated organism;MG153-106 reverse transcriptase
MDRNNEKPSCGQRARNAAKPAQKGPPASIETEEDTHNLNLYAGITLEAILEPSNLKEALKRVVANRGAPGIDGMEVGQLLDWIRNHPGQLTKAIKEGTYRPSPVKRVSIPKDEPGKFRDLGIPTVIDRLVQQATAQVLDWAYDRDFSDRSFGFRRNMRAHHALRVTAAEADQGYRWAVDMDLAKFFDTVNHSRLIRKLSLKIKDGRVISLIHKMLRSGVQINGETKPTEIGLMQGGPLSPLLANIYLDELDKELEKRGHRFARYADDLICICKSRRAAERTLASLTRFVQDKMLLKVNQEKSHVSLVTSSRTKFLGYGFYFSRAKGEVRLTIHKKSKQKLKDTIRQLLTRNPRTSIENVKQLLAQKLRGWMNYFQLADAQRWTQEVDRWIRRRIRQLLWKTWKKVKTRIKALIKLGADPARAYYWGCTRKGYWRISNSHILATTLTTDFLKRRGWSWLGCYKG

SEQ ID NO: 1976 - protein, 427 aa, unidentified
  source 1..427: note = uncultivated organism;MG153-107 reverse transcriptase
MVTLEAILESTNLNQAWKRVVANKGSAGVDGMEVKDLYAHLLEHGPELVQPIKEGRYKPQPVLRVLIPKEEKGKFRPLGIPTAIDRWVQQAVQQKLSEEYEKVFSESSHGFRPNRSCQTAVEQCLKLANEGYVWVVDLDLAKFFETVNHSKLLQLLSERIKDGRVISLIHKFLRAPVLEDGKSTPNTIGTPQGGPISPILANIMLNELDKKLEERGHPFVRYADDMMIFCKSRKSAERTLANIKPFIEKKLFLKLNEEKTKIRYIGSSDVKFLGFGFYAEKDGKIKDKPHQKSKDKCVKRLREITSRSRGQSLDAFRKQLSEFVRGWVNYFLRSDMAIFVRDTDKWLRRRIRQIYWKQWKKISTKYEALMRLGVSPSLAWQHANTRKSYWRTAHSWILATTLTNGFLHRKGWVCLGDVYKKRTQGSY

SEQ ID NO: 1977 - protein, 425 aa, unidentified
  source 1..425: note = uncultivated organism;MG153-108 reverse transcriptase
MEEQGIFIERILSNENMNRAYKQVKKNKGAAGIDGMECADLLSHLKVNGQQLRESIRNQSYKPMPVKRVEIPKADGSKRKLGIPTVTDRMVQQAAAQVLTPINERKFHENSYGFRPGKSAQKAVLKAVEYMNEGYNWVVDIDLEKFFDTVEHDKLISVLNKEIKDGKILSLIRKFLVSGVMVGEQIEETEIGTPQGGNISPLLANILLNELDWELESRGLKFARYADDCIIFVKSEKAAARVMESVTKYVENVLRLKVNRGKSKIGRPTEIQYLGFAFYYQFQEKKYKIKVPKKSLDKVMKKVRKLTSRKWGVSNSYKAQKIAEVVRGWINYFKIGSILTATRRLDTVIRYRFRMCIWKHWKNPKTRYKNLVKLGVSKKNAKSAAGFHGYVRVCRTETICYAMSNARLKKFGLLSAEEYFCQTRC

SEQ ID NO: 1978 - protein, 464 aa, unidentified
  source 1..464: note = uncultivated organism;MG153-109 reverse transcriptase
MKAENRGNEGFLQRESVEHQGYTEARSTDRSEGKERDGASDLLEAILDRDNLNRAYKRVKSNHGAAGIDGMSVEEALPWLKEHREELLQSIRDGSYEPSPVRRKEIPKPDGGVRKLGIPTVVDRVIQQGIAQKLQNIWEPQFSDSSYGYRPKRSGQQAIQKVKEYAEAGYRYAVSVDLSKYFDTLNHELLMNLLHRKIQDMRILRIIKKYLKSGVMENGVVSKTEEGSPQGGPLSPLLANIYLNEFDWEMHSRGVKTVRYADDIVVFAKSKRAAERLMESSRKYLEGKLKLKMNTEKSKVTSIFAVKEFKFLGFCIGRNGSGIYIRAHRKSLNKAKEKLKLLTERNRGRNVRRVMQEVKVYICGWLGYFHVADMKRTMKSWDEWLRRRFRMYIWKQWKKPRTKVANLRKLGIPADKAYQWGNSRLGYWRIAGSPVLACSITNERLAAAGYFSILNCYESLHSCD

SEQ ID NO: 1979 - protein, 427 aa, unidentified
  source 1..427: note = uncultivated organism;MG153-110 reverse transcriptase
MAKSHWTKAEPRGCSLIDLVCFYLDDAAQKVIKNKGAPGIDGITYEQLPNLLRVHGEKIRQKLKNGTYIPAPVRRVDIPKPNEGTRMLGIPTLLDRTIQQAIVMTIGDAFEGQFSDKSYGFREGRNCRQAVQRAQEYIKDGNRWVVEMDLSKFFDRVNHDILMDRVSRVIDDKAILKLIRRYLNAGIMEDGLVSPRLEGVPQGSPLSPLLSNIMLTDLDRELEARGLNHVRYADDCNIYVRSEKAAQRVLTNITKYVEETLKLRVNRDKSGTFRPRDSVFLGYTFSKANCTRIIVAQKSVKRLWTKLHKIFNTARGTSLGWAIKTITPVLRGWRNYYRLDDRKKYWEEMDERIRHHLRKLIWIAWKKPKTRERNLVKLGIDPERAWKSSVNGRGAWWNSGQSHMNQAIKNDRFVRLGLYSLRFMEIR

SEQ ID NO: 1980 - protein, 413 aa, unidentified
  source 1..413: note = uncultivated organism;MG153-111 reverse transcriptase
MITLEEVLSPENMQTACKRVIANKGAPGVDGMSVNEVRAHFEKHGASICAHIREGRYIPAAVKRVDIPKPNGGTRMLGIPTVQDRVIQQAIAQVLSKHFDPLFSEFSYGFRPGKSAHQAIEQTQKYIAEGRTWVVELDLAKFFDTVNHDRLMSKLGQHIEDKMLLRLIRRYLRTGIMADGVVQVREEGTPQGSPLSPILSLIVLDELDKYLDKRGLKYCRFADDCNCYAKSRKAAERTLENMISFIEGALKLRVNRDKSGVFRPSRAKFLGYTFVGTTGAARVHAKSLQRLRDKLKEIFFRARGTSLLKTIAKLNTVLRGWRNYFRLDERKGIFESLDIHIRRHLRKLIWIAWKKPKTRERNLVKRGLDPVQAWKSSVNGRGAWWNAGALHMRQAFDNQFFQKMGLYSLLAQA

SEQ ID NO: 1981 - protein, 477 aa, unidentified
  source 1..477: note = uncultivated organism;MG153-112 reverse transcriptase
MKNAENVRSCLQRDSTECEGYAGAQSAVQPGSGETAGRSQNLLEAILYRDNLNRAYKRVKANKGAPGVDGMTVEEALPWLKEHGKEMTEAIRSGKYKPTAVRRKEIPKPDGGVCKLGIPMVKDRIVQQAIAQQFMPLYEPKFSEGSYGYRPGRSAQDAIFKIRGYADEGYEWAVQLDLSKYFDTLNHEKLLNLLRETIKDERVIQLIKKFLKSGVMENGVKIATTEGSSQGGPLSPLLANVYLNEFDCEYERRGVPVIRYADDIVLLCKSQRAAERLQESSIRYLEGKLKLRVNRDKSHIARVNATKNFKFLGFAYGKGKDGLFIRAHPKALLKAKNRLRAITKRNRGVNVRKVMQEIKVYMTGWLNYYGIAFLKTKMREWDEWLRHRIRAYIWKQWKKPKTKRKNLMKLGVPEYYAHMAANSRRGYWFTVNTGAVTRGITNERLTRAGFFELSPAYESIQTACIGRAVYRTVRTVR

SEQ ID NO: 1982 - protein, 455 aa, unidentified
  source 1..455: note = uncultivated organism;MG153-113 reverse transcriptase
MTMRGAMRQMSASAERSGVGQGEALSDPGSDAATRPRHETEGTGPGLLVAVLARENMQQAWKRVRANKGAAGIDGLDIDQTAERLRSKWPSIREQLLCGTYRPQPVRRVTIPKPDGGERELGIPTVTDRLIQQALLQVLQPILDPTFSPHSYGFRPGRSAHGAVHAAQANVQSGRRVVVDVDLEKFFDRVNHDILIDRVQKRIGDAGVIRLIRAYLNSGIMMDGVVQERVMGTPQGGPLSPLLANVLLDEVDKELERRGHSFVRYADDANVYVRSRRAGKRVMALLLKLYGRLRLKVNEAKSAVASVFQRKFLGYSFWAAPGGAIKRRVANKPIAMFKQRVRRLTRRSGGRSLQEVVTKLRVYVLGWKAYFRLAQTPRVWEELDQWMRHRIRAIQLKHWKRAKTIYPDLLARKASSTVAAQVAANARRWWRNSGMLLNSVLNLAWADRLGIPRLC

SEQ ID NO: 1983 - protein, 464 aa, unidentified
  source 1..464: note = uncultivated organism;MG153-114 reverse transcriptase
MSNSQPKLRPQQTSQEACDAENMVKPEGMHRERSAGAVRNSGETSETESLMEQVVARANMLAALRRVESNKGAPGNDGMTVAELRGYLKTNWPRIKAELLADAYKPQAVRRVEMPKPDGGIRLLGIPNVVDRLVQQALLQVFTPIFDPTFSAFSFGFRPGRSAHDAVKLARDYIEAGDEWVVDIDLAKFFDQVNHDRLMARIWRRVKDKRVLHLIRRYLQAGVMLNGVVIATEEGTPQGGPLSPLLANIMLDDLDKLLEQRGHRFCRYADDCNIYVRSQRAGERVMSSVRRFIEGRLGLKINESKSKVDRPRNRKFLGFSFFRRHGIRMRVASKSLERFKTRVREITARSNGWSMERRIYALRIYLRGWMQYFRLAETPKVYRELDSWVLHRLRLCQWKQWKRPRTRLRKLRALKLNEDDACKLAGSRRGYWPTTCGALHKAMPRRYWIERGFAGLSECFVLSV

SEQ ID NO: 1984 - protein, 435 aa, unidentified
  source 1..435: note = uncultivated organism;MG153-115 reverse transcriptase
MGGKRQKNQLQMVLAFAVEGRSEAPMARREGIETSTAKRECESPAIPGQVMEEVCERENCLRALKRVKSNKGSPGIDGMKVEELPGYLKQHWLAIREQLLSGNYEPQPVRRVEIPKPDGGVRKLGIPTVLDRFVQQAVMQVLQGRWDGTFSEHSHGFRPGRSAHQAVRKAQQYVAGGRRWVVDLDLEKFFDRVNHDRLMKSVALRIADKRMLRLIGAFLKAGVMENGLVSPVDEGTPQGGPLSPLLSNLVLDELDRELERRGHCFVRYADDCNIYVRSGGAGRRVMRSVTCFITRRLKLKVNESKSAVARPVERKFLGFSISNAREPKRRIAPKVLLRCKRKIRELTRRTRGISLERMTKELTSYLRGWKSYFGICETPSVLKSLDQWIRRRLRSVIQKQWKRQCPWRMANSPAMSLAFPIAYFDSLGLPRLFAG

SEQ ID NO: 1985 - protein, 463 aa, unidentified
  source 1..463: note = uncultivated organism;MG153-116 reverse transcriptase
MNLRNDKRQNIQMELDFSSGPVGEVRRAGRKETESSRTVNVSESPASTNRLMEEVCERENLIEALRQVKANKGSAGVDGMTVGQLTDYLKQHWPAIQEQLLSGTYEPMPVRRVEIPKPDGGGVRKLGIPSVLDRFIQQAVMQVLQRRWDRTFSDHSYGFRPGRSAHQAVAQAQQYIAAGYTWVVDFDLEKFFDRVNHDKLMGQIAKRVEDKRLLKLIRAFLNAGVMENGLVSPSVEGTPQGGPLSPLLSNLVLDELDRELERRGHCFVRYADDSNIYVRSERAGQRVMKSVTRFITNRLKLKVHEAKSAVAQPQERKFLGFTFTTGPEVKRAIAPKALDRFKRRIREITRRAKSVSIESTIAERAPYMRGWRSYFGFCETPVVLEYLTRWVRLRLRAALWRQWKTTRRRRAALLELGVRPRLASNTAVSGRGPWYLARAKALSVGLSNAYFKSRGLPSLIEEG

SEQ ID NO: 1986 - protein, 444 aa, unidentified
  source 1..444: note = uncultivated organism;MG153-117 reverse transcriptase
MSNLSARMPTGNDVTQRIDPKPAFSKDLFEQMLLPANLQRAWRQVRANKGAAGVDGMGVDDFPAWVRSGEWDKVKAALRAGDYFPQPVRRVEIEKPEGGKRPLGIPTVNDRVIQQAIAQVLTPLFDPVFSAHSFGFRPDRNGQQAVKQVQQIIKQQRRIAVDVDLSKFFDRVNHDVLMSFVSRWVHDKRLKQLIARYLRAGYVDNQIFHETREGVPQGGPLSPLLANIMLDPLDKELERRGHKFARYADDFIILVRSQRAGERVLCSITQYLQNRLKLVINTEKSQVVKTTESKFLGFTFKNCLIQWHPKTLHKFKQRIRELTNRNWGVSMHYQLFKTSQFIRGWINYFGIANCYQLCCDLDHWIRRRVRMAYWRQWRKPRTKVRNLMRLGVHVQAAVACGITSKGPWRSSKTPGINQALSNEFLKKSGLVTLRDGWIKLHYPE

SEQ ID NO: 1987 - protein, 410 aa, unidentified
  source 1..410: note = uncultivated organism;MG153-118 reverse transcriptase
MKERMQKTLSQVNGCPQRDRSETEWYGGVQTFMWMCEDNIVEVPFDKEHLFEQILSPSNLNRAYKAVMRNKGCGGIDKMSCEQLLPWLLTNKDALIRSLKDGSYRPNPVKRVEMPKDNGKMRLLGIPTVVDRLVQQAINQVLTPIYENQFSNTSYGFRPRRGCHDALRGAQRIINEGYIYVVDLDLERFFDTVSHSKLIEILSRTIKDGRVVSLIHKSLRSGVMNKGLFEASEEGTPQGGPLSPLLSNIMLNELDKELERRELPFIRYADDSMIFCKSKRAAMRVKESITRFIENTLNLKVNKEKTIVSYVLGVKYLAYYHLANMKRLLHVTDEWLRRRIRMCIWKAWKKPKTKVAKLIKCGINKSQAYEWGNTRKGYWRIANSYILHRAITNEHLCRAGYVTLMDAYLE

SEQ ID NO: 1988 - protein, 470 aa, unidentified
  source 1..470: note = uncultivated organism;MG153-119 reverse transcriptase
MNVTESGFKNRQLHMEDYLQMVSAEQREYAEVFDYSKITEKSGVITDYWTNNLLDLILRKGNLNEAYKQVKRNKGKGGIDGMQVDELLPFLRENQETLIQEIREGRYKPNPVRRVEIPKETKGEFRKLGVPTVVDRVIQQAIAQELSPIFEEQFSENSFGFRPKRGAHDALKQCQKNVNDGYVYVVDMDLEKFFDTVCQSKLIEVLSRTIKDGRVISLIHKYLNAGVVANGKFERTEVGMPQGGPLSPLLSNIMLNELDKELERRGHRFVRYADDCMIFCKSRKSAERTLENIIPFIEGKLFLKVNRKKTEVSHISKVKYLGYTFYRYKGKCRFRVHPKSVSKMKNKIRELTDRNKGISNAEREKKYQEYVRGWVEYFRLADMKGLLKETDEWARRRIRAVYWKQWKKIKTKYRMLKALGLEHWKAKELACSRKGYWRMAKVLNQIFSNKIIARLGYTSMLDYYLVVYEN

SEQ ID NO: 1989 - protein, 433 aa, unidentified
  source 1..433: note = uncultivated organism;MG153-120 reverse transcriptase
MGLMELILSESNLKCAIRSVKKNKGAPGIDKMTVGELDEYFRLHGNEIRKQIFAKQYKPKPVRRVYIPKANGKQRPLGIPTVVDRVIQQAVAQVRVKGYEPRFSQYSYGFRPNRDCHMAMEQVLEYLNEGYEWVIDLDIEKYFDTVNHDKLISILRERINDATTLHLIRSFLKAGVMEDGLVSSTVVGVPQGGPLSPILSNVYLDKLDQELESRGLRFVRYADDCNIFVKSEMAADRVMKSVTSWLERKLFLKVSAEKTKVVRPTKSTFLGFTFWGSKDGWKCKPAQDRKKKLYAKIRKWLRRKNAVARPLNVTFTKLNQIIRGWINYFRIGSMKGFLEKFSQWMRHKVRVVILKQWKKPRTIYRNLMKLNKYIHANLSDESIFKVANSRLGWYRRCGGDVVNYLLSPKVLAIAQKDRPGLVDPLAYYLSRMQ

SEQ ID NO: 1990 - protein, 445 aa, unidentified
  source 1..445: note = uncultivated organism;MG153-121 reverse transcriptase
MSVSQRVTQNQYFIYLRKRKEETDMELLEEILNQNNLNKAYKKVVANKGVAGVDGITVEEEFDYLKENKDRIINQIRKRKYKPQPVKRVQIPKENGKMRNLGIPTVTDRIIQQAIFQVISPIFEKQFNDNSFGFRPNRSCEQAVIRALEYLNDGYEWIVDIDLEKFFDTVNQDKLITIIGKTITDGDVVSLIRKYLSAGVMEKGIVKATTVGTPQGGNLSPLLSNIMLNELDKELEARGLNFVRYADDCIILVKSEKAANRVLASITKFIEKKLGLKVNAEKSKVTRPAQTKYLGFSFWKSPKGQWKPKPHLKSYQKLVRKLKQLTDRSWSISLDNRIKKINYVARGWVNYFRIANMKNKITEIDEHLRVRIRVIIWKQWKKIRKKCESLQKLGVPFEIAFNCANTRKGYYQICKTRYIQFAINNERLRKRGLVFLLDQYEKVHI

SEQ ID NO: 1991 - protein, 430 aa, unidentified
  source 1..430: note = uncultivated organism;MG153-122 reverse transcriptase
MELIEKILSEDSINEAIEKVVSNKGAAGVDSMTTAEVESYYFTHGFEIITQIKNKIYKPLPVRRVYIPKPNGKKRPLGIPVVKDRVIQQSLAQALSDIYEPHFSDYSYGFRKGRSQHDAMNKVLEYLNDGYEWVIDLDIEKYFDTVNHDKLVSILRERVKDDITLHLIRSILKSGIMEDGLVSPSEEGVPQGSPVSCVLSNIYLDKFDKELEARGLRFARFADDVNIFVKSEMSAERVMKSISSWLERKLFLKVSATKTKVVRPKDSNFLGFTFVKSKDGWKCKPMDDRKKRLYSKCRAVLIRRKAVAVPLSVTFKRVNEIVRGWINYFRISSMKMFMKEFGQWLRHKIRAIILKQWKKPLRIYKNLMYMNKKQRCGFSHEDIFKVANSRKGLYARANGDVVNFILSPKILAIKSGDRPGLVNPLEYYLG

SEQ ID NO: 1992 - protein, 431 aa, unidentified
  source 1..431: note = uncultivated organism;MG153-123 reverse transcriptase
MRLIDEILSDSNIDRAILQVKRNKGVSGIDKMTVDELDEYFYKHRREIRYSILNKKYKPQSVKRVYIPKPNGKKRPLGIPTVVDRVIQQAVAQILMKKLDSSFCEFSYGFRPRRSAQMAVLKTLEYINEGYDWVIDLDIEAYFDTVNHDKLISILREKNVNDSTTLHLIRKFMQAGIMEDGLVKPSRVGVQQGGPLSPILSNLYLNKFDKELENRGLRFVRYADDCNIFVKSEMSANRVMKSVTSWLERKLFLKVSATKTKVVRPPESKFLGFTYLKRYGEWKCKPSNQSKMKIYDKCRRELIRRIGIARPLAVTFKRINQIVVGWINYYRIGVMKYFIDVFGQWLRHKIRVIILKQWKRPKTIYKNLYKMNRLFSCQFSDEQIFSVANSRRRLYSQACGHVINNIISPKFLGKRIGDRPGLVNPLNYYLS

SEQ ID NO: 1993 - protein, 443 aa, unidentified
  source 1..443: note = uncultivated organism;MG153-124 reverse transcriptase
MEQDNPDSAAKATQGGDAAGGQPRTWWWAEASIWTDRMMSALGNGVKGGKWFSLVDKAIRPTTLEAAWRKVERNKGAAGVDGQSIERFAAGAERYLAELHENLKNGSYRPSPIKRVDIPKGGGQTRPLGIPTIKDRIVQTALKMTIEPIFEVQFRPGSYGFRPGRSCKDALREVDRLLKEGYTHVVDADLKSYFDTIPHDRLMARVGETISDGRVLKLIDGFLKQEIMSDMARWLPTTGTPQGAVLSPMLANIYLHPLDLLMEQSGRRMVRYADDFVILCRTEDEARAALRDVDAWTTANGLTLHPDKTRIVDSRQPGQGFDFLGYRFEAGRRFVRDKSLRAFKDKVRAKTVRSRGDSLARIIADLNPALRGWFGYFKHAAPFQLRYLDRFVRRRLRAVLRKQDKRPGFGRCKADHQRWPNAFFADQGLFTLTTALAHARHSR

SEQ ID NO: 1994 - protein, 438 aa, unidentified
  source 1..438: note = uncultivated organism;MG153-125 reverse transcriptase
MIEQVLNQRNIMQAYRQVVSNKGSAGVDGMSVKELYVHLTNNREQIESDIRAGKYLPQAIKGVEIPKGNGKVRLLGVPTVTDRLLQQAVGQVLAIKFEMVFEDNSYGFRPNRNAQQAVLKAQEYINSGYHHIVDIDLKSFFDEVDHGILLQLLYRKVKCPLTLRLIRKWLRAPILINGKLIKRRKGVPQGSPLSPLLPNIMLNELDKELEKQGLRYVRYADDFSIYTKSNTAARKIGNSIFLFLKDKLKLPINREKSGIRKPVNFKVLGYGFVPTYRKGEKGKYQLVANEKSWKSLKEKLKTITRKTTPMSFDERIQKLKEVTQGWLNYFRMASIHGKLKELDGWPRNRLRYCIWHHWKKPERKRKNLIQLGVDPEHAYQWSRTRMGGWATAQSPILVTTITLERLRERGYEALLTYYEKIAPHLNEPLYTRTVRTVV

SEQ ID NO: 1995 - protein, 466 aa, unidentified
  source 1..466: note = uncultivated organism;MG153-126 reverse transcriptase
MTTGAAEGRVEMPGAKPEVGGRKPLVSGDGAANVTGRTDHSGPETERLMETVLSRGNMMTALSRVVANKGAPGVDNMPVTDLKGYLHEHWPRIKEELLGGKYRPQPVLKVEIPKPGGGKRMLGIPTVLDRLIQQAVHQVLSLKFDSDFSANSYGFRPGRNAHQAVQAARQYVAEGRRWVVDMDLEKFFDRVNHEILMSLVKRKVKDRMVLKLIDSYLKAGMLDGGVVSPRQEDTPQGGPLSPLLSNILLDELDKELERRGHAFCRYADDCNIYVATKASGERVMASITRFLSQRLKLTVNQAKSAVDRPWKRTFLGYTMNWYPRPRLRVGAVAVSRFRANVRKVCRRGRGRSLPQVINELNPKVRGWLNYFRHIESDYLLKELDGWLRRKLRVIIWKQWKRTRTRAKNLIKPGLSSGASWRFARKQRGPWVAAGENVMNRLLNNAYFESLGLVSLQNQYHRLQRVS

SEQ ID NO: 1996 - protein, 444 aa, unidentified
  source 1..444: note = uncultivated organism;MG153-127 reverse transcriptase
MEDKPSKVPATAPQGGDIRARWAWVEPAVWTDPMLTALEQGVRGGKWFRLIDKVFSEKNLLASHRKVEANRGAPGVDHVTIEEFSQQLGPNLENLTAALRGGSYMPQAIRRVFIPKPGGREQRPLGIPTVRDRVVQGAVRHVLEPIFEREFAEQSYGFRPGRGCKDALRRVDHLLKNGFEHVVDVDLKSYFDTIPHGRLMNRVRERVADGRVLDLVEAFLKAGIMNGLEETEPEMGAPQGAVLSPLLSNIYLNPLDHLMVSKDFEMVRYADDFVILCRSREEAEQALAIVRQWCEAEGLTVHPTKTKVVHVRNEGFDFLGYHFQATQRGRLTRWPREKSLMKLRDTIRSKTRRTNGNSLECVILDLNRSLRGWFGYFKHSCRQSLRQIDMWIRGRLRTLLRKRSKRSGFACGEDQKRYRNAFFEELGLFNLTAAHGLEGQSSRG

SEQ ID NO: 1997 - protein, 443 aa, unidentified
  source 1..443: note = uncultivated organism;MG153-128 reverse transcriptase
MDDILDKILMPENIRAAIDEVRKNKGAPGIDKMPVDELMGFFALNESAVIRQILNKEYKPQPVRRVYIPKPNSDKLRPLGIPTVIDRVVQQMVARVFTREYDPPFSPHSYGFRPNRDCHKAMAEALEYLNEGRTWIIDFDIEKYFDTVNHDKLISILRENVNDAVILHLIRSFLKAGVMDDGLVSPTEEGVPQGGPLSPVLSNIYLDKLDKELEARGLAFVRYADDFVIFARSRKSAERVMKSVTSWIERKLFLKVSPTKTHIVPPSKSEFLGFGFWKNGSEWKCKPLASRKSRLWDKLRAVTCRRKAAAIPLSVTVNKVNEIMRGWINYYRIGNMKGFMDLTGQWIRHRIRVIMVKQWKKPKTIQKNLRWYCAVFHLNFSDEDLYKVANSRKGLYAQCNGDVINYILSPKVLSMKLTIGKGRNSRAVYPGLVNPLAYYLGTT

SEQ ID NO: 1998 - protein, 470 aa, unidentified
  source 1..470: note = uncultivated organism;MG153-129 reverse transcriptase
MKERMQNESRKLGQSESRVEPKAMTGLQTSMGIIENGLTEFTRPKDGLLEFILSPVNLNAAYKKVKGNKGSGGIDGMSTEYLLPYLKEHGSELVASLREGTYKPNPVRRVEIPKANGKKRGLGIPTVVDRVVQQAVSQVLEVLYEPQFSETSYGFRPRRGTHKALLKCGEYIEQGYVFTVDMDLEKFFDTVSHSKLIEVLSRSVKDGRVVSLIHRYLNAGVVNRGKYEPSSLGVPQGGPLSPMLSNIMLNELDKELEHRGHKFVRYADDLVIFCKSRKAAQRTYEHIVPFIEGKLYLKVNREKTKVAYMRDIKFLSYAFGRRNGKCQYRLHPESISKMKDKIRELTSRSNGWGYEYRKQRLTWYIRGWSNYFSLAGYKNRLEEWDSWLRHRIRMCIWKQWKRVRTRYHNLQKLVPDENRVRTAAFSRKSYWRMASHPVVHEAMSDERLKKAGYPTFAEYYVDFNKARGYY

SEQ ID NO: 1999 - protein, 424 aa, unidentified
  source 1..424: note = uncultivated organism;MG153-130 reverse transcriptase
MSEMLEKILSDENIRLAKKRVYANKGAGGVDEVTVQELDDYMAQNWEDIKQQIRERRYRPQPVLRVEIPKPNGGVRKLGIPTVVDRTIEQAITQVLSPIFEQLFSDHSYGFRPNRSCEQAIRKLLEYFNEDYTWIVDIDLEKFFDNVPQDKLMSYVGRVIHDGDTESLIRKNLKAGVMVRGKYESTKVGTPQGGNLSPLLSNIMLNELDKELEKRELRFTRYADDCVIVVKSEASAKRVMYSITSWIERKLGLKVNATKTQITRPMKLKYLGFGFWKSKEGWRTRPHQDSVSKFKRTIKKLCKRSWSVSLTYRLGKLNAVVRGWINYFALGDMISAITRIDKHLMVQMRVIIWKQWKVPKKREWGLKKLGVKPWIAHEQSHIKGYMKAVRLPQIKKAISKEKLTKRGLVSPLEYYLRQHTLKLN

SEQ ID NO: 2000 - protein, 432 aa, unidentified
  source 1..432: note = uncultivated organism;MG153-131 reverse transcriptase
MSLIEEILSNENLNEAIKRVKANKGASGTDKMTTDMLEPYFYEHRKEIIESIMNKTYKPQPVRRVYIPKSNGKLRPLGIPTVVDRVIQQAIAQKLVPIYENVFSEYSYGFRPNRDCHMAINKVLEYLNSGFEWVIDLDIEKYFDTVNHDKLISILREQVNDSHTLHLIRKFLQAGVMDNGLVSSTTIGVPQGGPLSPILSNIYLDKFDKELEARGLHFVRYADDCNIFVRSDVSAERVMKSVTSWLERKLFLKVSATKTKITRPTNSNFLGFTFLKNSDKWRCKPGKDRKAKLYEKVKVVLKRKHAVSRPLATTFTKLNQIIRGWINYFRIGSMRNFIDEFGQWLRHKVRTIIIKQWKKPKRIYVNLKVINDLFKCNFSHEDIFKVANTRLGWYKRAGMNVVNYILSPKVLELANKKKGRPGLVNPLAYYLK

SEQ ID NO: 2001 - protein, 464 aa, unidentified
  source 1..464: note = uncultivated organism;MG153-132 reverse transcriptase
MKKAEYPGNEGCPQRDSAEHEEYAGARSADRRETEETDGADLLERILDRGNLNRAYKRVKANKGAPGIDGMTVEDALPWLREHREELLDQIRNGKYKPQPVRRKEIPKPDGGIRKLGIPTVVDRVIQQAIAQQLTPIYEPLFSDGSYGYRPGRSAQMAIQKVKEYAEQGYTTAVLIDLSKYFDTLNHDLLMNMVREEVHDKRVIELIKRFLKSGVMENGLHIKTEEGSPQGGPLSPLLANIYLNKFDHEMESRGVHVIRYADDIVVLARTPRAGERLLESSRRYLEGKLKLKMNMDKSRVVSVYSKRNFKFLGFALGKGKDGVFIRAHAKSLKKAKQKLKELTSRSQGRNVRVVMYKVKVFIRGWLGYFYIASMRNTMKSWDEWLRRRFRMYIWKQWKKPRTRMRYLMKLGVPDWRACAVAYSRKAYWRCAKHASVNEAISSKRLAQAGYYSILDRYESLHLCD

SEQ ID NO: 2002 - protein, 433 aa, unidentified
  source 1..433: note = uncultivated organism;MG153-133 reverse transcriptase
MTHVQLDFSNITLERILSPDNLLEALKRVEANKGAPGVDGMRTDELRDYIRQHPGELTSVVRSGRYKPSPVKRVTIPKAEKGKFRDLGIPTVIDRLVQQAVAQILTIYYDETFSDASCGFRPGRGAHDAIYKCVARTAEGFVWAVDMDLAKFFDTVNHSRLIRKLSTRIKDKRVISLIHRMLKSGIDTGKEIIPSEVGLMQGGPLSPILANIYLDELDKEFEKRKLVHIRYADDVICLCRSKRAAERVLESISRFLERRMLLKINREKSGVNHITRGIKFLGYGFYRAGKKGILPTVHYKSKRRFTETIKTVLSRNPKRSIEAVKEELRTKLMGWTAYFQLACYEVWRQRTDQWIRRRIRQLLWKCWKRVRTRYRALRMLGCSHEEACEWANTRKSYWRVADSHILATTLTNDFLKSHGWTWLALSCKTVGWE

SEQ ID NO: 2003 - protein, 469 aa, unidentified
  source 1..469: note = uncultivated organism;MG153-134 reverse transcriptase
MKTTESDKLKHRQLTVWDYLRRDTAEQEEQAGVCVSPRMDETDTTNQPEQKELLEQILAPENFDKAVKRVKANRGAGGSDGMSVHELDAWLEGHQEKLLERLRGGKYHPQPVLRVEIPKDNGKTRKLGIPTVVDRAIQQAISQVLSPIYEQQFSDRSYGFRPGRSAHDALRQCLDYITEGYRWVVDMDLEKFFDTVNQSKLIQVLSNTVKDGRVVSLIHKYLRAGIMVNGMFEGSKEGVPQGGPLSPLLGNIMLNESDQELERRGHRFVRYADDMVIFCKSRKAAERTLVSITKFIEGKLFLKVNREKTTVAYVGKIKFLGHGFYVDKDGGQLRVHPQRVEKFKAKVRKITGRSNGWSIQGRKARLNALIRGWVNYFKLARMKGLLQKLDGWIRRRLRMVTWKRWKRVRSRFTNLMKAGISKWWAWQWANTRRGYWAIAGSVILTGAIPNALLTKAGYLTLSECYAKVM

SEQ ID NO: 2004 - protein, 417 aa, unidentified
  source 1..417: note = uncultivated organism;MG153-135 reverse transcriptase
MGQLMNQILSRENMKMAYKKVKANKGAGGIDGISIEDVNKYLKENWIDIKTKILKRKYKPQPVLRVEIPKPNGGVRNLGIPTVVDRIIEEAIAQILTPMFEPQFSEHSYGFRPGRRAQQAIVELLEYLNDGYTYIVDIDLEKFFDNVPQDKLMYLVGKTVKDPDVISLVTKYLRAGVMVKGKYEETTIGTPQGGNLSPLLSNIMLNELDKELEARGLHFVRYADDCIITVASSAAANRVMHTVTSWIERKLSLKVNATKSKVTKPTGLKYLGFGFVKMNGKWEARPHKDSINRFKKKLKKLTYRSWSVSMDYRILRLNQVIRGWINYFRIGKMKQNMTKIDKHLRNRMRIVIWKQWKTSKKRMWGLRKLGVPEWMARQSVGFADHYQAVAKTAGLRRITKEILAKRGLISCLDYYLN

SEQ ID NO: 2005 - protein, 461 aa, unidentified
  source 1..461: note = uncultivated organism;MG153-136 reverse transcriptase
MGEKRQNNQLELAFMAEMRSEAPKTAAEGTETSIAKRTPEDPALPVLLMEEIVERENLLKALRRVSRNKGGPGIDGMTVGKLPGYLKKHWPRIRGQLLAGTYQPEPVKRVEIPKADGGMRKLGIPTVLDRFVQQAIMQVLQKYWDRTFTEHSYGFRPGRSAHQAVYQAQQYVEQGYRWVVDIDLERFFDRVNHDKLMGKLAKRIHDKRLLKVVRTFLNAGVMEDGLVSPSTQGTPQGGPLSPLLSNIYLDELDRELQRRGHRFVRYADDCNIYVRSERAGKRVMESISKFIAGKLKLKVNQSKSKVDRTWRCKFLGFRLLPGKRIKRGIAPSSVLRFKSRVRRLTRRNRSVKLQQIIEQLNLYIRGWRGYFGFCQTPSVLGNLDCWIRRRLRCIVWKQWKRGTRRFAALRSMDINKSLAARTAGSVHGPWRVSRSPALSFALSNGYFDSLGLVHLTELGTA

SEQ ID NO: 2006 - protein, 448 aa, unidentified
  source 1..448: note = uncultivated organism;MG153-137 reverse transcriptase
MLPRHLVRIVNPNGGVVYKRIVEEQFSNDQLLERILSTENVGLAWKKVRANKGAPGIDGITIEEFPFTFRECWPEIRSTILEGHYVPSPVQRVEIPKPDGSTRPLGIPTVLDRVIQQAVAQVMGPISDPWFSESSCGFRPRRSAHDGIKQIKRYIRKGYKVSVDMDLSKFFDTVNHDVLMHRVARRIEDKRVLKLIGKYLRAGVMVKGRRLATPLGVPQGWPLSPLLANILLDDLDRELENRGHHFVRYADDFIIMVKSLSAGQRVMGSIHRFLERELRLTVNEKKSKVGPAEECGFLGFVFVRGKIRWSDKAFREFKRRIRLFTGRSWFVSMEYRLLKLAEYVRGWMNYYGISEYYRPIPEIDEWLRRRLRMCFWKQWRYTRTKVYNLLKLGTSKRQAIMTALSRKGPWHLARPLATQVGMTNKWLKEQGLISVKDQWVKIHYPASA

SEQ ID NO: 2007 - protein, 489 aa, unidentified
  source 1..489: note = uncultivated organism;MG153-138 reverse transcriptase
MSKVKKTANPGKINRDLPEEDGAELRSTLGESSFASALPDEKDRITMDTSKLLEKVIDRNNLNLAFKRVKKNGGSHGVDGMKVEELLPHLKQHGEQIKRDLLEGKYRPQPVRRVEIPKPNGGGVRLLGIPAVVDRMLQQAIAQVLTPIFEKEFSDYSYGFRPGKSAHDAIKQAQVYLNEGYTTVVDIDLENFFDRVNHDKLMYLLSKRISDKRLLKLIRRYLESGVMVGGLVSPSREGTVQGGPLSPLLSNVMLHELDMELEKRGHRFCRYADDCNCYVKSRRAGERVMSSISEFIEQRLKLKVNRDKSAVDYVNRRKFLGFSFYRAKGEYRIRVDAKSLKRLKDKLRLLTYRSNGWSIDARIYRLNQVIRGWVNYFSLADMRSHCLLLDEWLRRRLGMCYWKQWKKVKTKHTNLVKLGIPVWKAWEYANSRKGYWHIANSWIMHRSLTNAYLEKAGLHSLSYVYFNLNLTNRRMPNGTYGGVRGQQVN

SEQ ID NO: 2008 - protein, 457 aa, unidentified
  source 1..457: note = uncultivated organism;MG153-139 reverse transcriptase
MGSEKTQPKRAGTGQNSGETGIGASSLSASMGRSGAEVAEMMERVVESSNMRKAYWRVVGNKGSAGVDGMTVAELKGHLQANWAILKERLLAGTYIPSPVLRVEIPKPGGKGLRPLGIPTVTDRVIQQALHQVMVPLWDKEFSGYSYGFRAGRSAHQAIRQSREYVAEGRRWVVDMDLEKFFDRVNHNILMDRVARKVRDKRVLKLIRRYLKAGILVGGVVEVPQQGTPQGGPLSPLLSNILLDDLDKELERRGHAFCRYADDCNIYVRSRKAGERVLSSISRYLEEELKLKVNKEKSAVDRPWRRTFLGYTMTWHKEPRLRVGPEAIRRLKGKVRKLAASGRGRSLRYTISLLTPLLRGWYNYFSLAQVRNIFEELDGWIRRRLRCILWRQWKRSFTRARNLMKRGLSEERSWRSATNGRGPWWNSGASHMNRAYPKSYFDCLGLYSFLDHHVVTS

SEQ ID NO: 2009 - protein, 444 aa, unidentified
  source 1..444: note = uncultivated organism;MG153-140 reverse transcriptase
MIENENKTVGVSYGTKQTEETRLWDWVERSIWTDRMLEALETGVKGGVWFSLIDKVYRPQTLYAAWKAVKRNRGSAGTDHESIERFEQKLEENIKKLSEELRTGTYYPRPIKRRYIDKPGSKEKRPLGIPAVRDRVVQTTIRLVIEPIFERQFRDYSYGFRPKRGCKDALREVEKRLKAGYSHVVDADLKTYFDSIPHDRLMQDVQRYIADGRVLKLIKNFLKQDVLDGLAQWTPEAGTPQGAVISPMLANLYLHPVDQAMEEAGFIMIRYADDFVIMCKDEKEAKQAMCKVSQLITERGLVLHPEKTCIVNTNEAGQGFDFLGYHFERGTRWPRKKSLKKLKDTIRSQTGRSNGHSMAVITANLNRTLRGWFEYFKHSHKWTFRILDGWIRRRLRSILRKRNKGAKGISGKMDHFRWPNKFFQELGLYSLEEAHDLLFQSSRR

SEQ ID NO: 2010 - protein, 467 aa, unidentified
  source 1..467: note = uncultivated organism;MG153-141 reverse transcriptase
MKVSQNNQRLQKTKYLGSSAEDRVELEDKQRVHRKFSATTNGGTNEFQYGSLERILSINNVVSAMKRVIANKGSHGVDGMTVYELKQFLNMNWSNIRENILNGEYKPMPVRRVEIPKPNGGTRLLGIPTVLDRVIQQAIAQELNNIYDKKFSQNSFGFRPRRDAKGAIKKAESYINEGYRWVVDIDLEKFFDKVNHDILMYKLSMDINDKRVLKLIRRYLQSGIMINGVVVTNEEGTPQGGPLSPLLSNIMLDELDKELEKRGHRFCRYADDCNIYVKSKRAGERVMENITTFIEDKLKLKVNKDKSAVERPWKRKFLGFTLNLMFGKAYSSISKQSLKRHKEKLRNILSRSKPIPLEQRINKLNQVNIGWVNYYGIAKCKGILGQLDTWIRQRLRMCIWKQWKKVRTRYRNLKKLGLTHYQAIKFANTRKGYWRIANSAILNITLTNQFFTDLGLKSLTRQYIKIH

SEQ ID NO: 2011 - protein, 251 aa, synthetic construct
  source 1..251: note = MG160-488 reverse transcriptase ancestor
MTQKWTHRFELKPGRWVFVPTPESRARGEEIKKAVEKRWKPPSFYYHLRNGGHVAALRSHVDNKYFFRADIDDFFGRVNRSRVTRCLKSYFSYAEAREMANESVVKHPGHNKFMLPYGFVQSPILASLALDKSRLGRYLRKLNKRKGLTVSVYVDDIIISSNDESLLGEVAEELKQLAEKARFPLNAEKTEGPAEAITAFNIELSHGSLKITPERMEEFREAYQSASSEHQKAGILGYVNSVNPAQVASLA

SEQ ID NO: 2012 - protein, 251 aa, synthetic construct
  source 1..251: note = MG160-489 reverse transcriptase ancestor
MTQKWTHRFELKPGRWVFVPTPESRARGAEIKKAVEKRWKPPSFYYHLRNGGHVAALRSHVDNKYFFRADIDDFFGRVNRSRVTRCLKSYFSYAEAREMANESVVKHPGHNKFILPYGFVQSPILASLALDKSRLGRYLRKLNKRKGLTVSVYVDDIIISSNDEALLGEVAEELKQLAEKALFPLNAEKTEGPAEAITAFNIELSHGSLRITPERMEEFREAYQSASSEHQKAGILGYVNSVNPAQVASLA

SEQ ID NO: 2013 - protein, 251 aa, synthetic construct
  source 1..251: note = MG160-490 reverse transcriptase ancestor
MTQKWTHRYQLKPGRWVFVPTDEAKKTGARIKRAVEARWKPPNFYFHLRKGGHVAAVRSHVENKYFFRADLDDFFGRVNRSRVTRCLKSWFSYAEAREMASESVVKRPGHEGFILPYGFVQSPILASLALDKSKLGRYLRKLNRRSDLTVSVYVDDIIISSNDESQLGEVAERLKQLADKALFPLSASKTEGPAEEVTAFNIELSHGALRITDERMAELRADYQSATSEHSKAGILGYVDSVNPAQVASLA

SEQ ID NO: 2014 - protein, 251 aa, synthetic construct
  source 1..251: note = MG160-491 reverse transcriptase ancestor
MTQKWTHRYQLKPGRWVFAPTDEAKKTGARIKRAVEAHWKPPNFYFHLRNGGHVAAVRSHVASKYFFRADLDDFFGRVNRSRVTRCLKSWFSYAEAREMASESVVKRPGHEGFVLPYGFVQSPILASLALDKSKLGSYLRKLNGRSDLTVSVYVDDIIISSDDESQLGEVAERLKQLADKALFPLSASKTEGPAEEVTAFNIELSHAALRITDERMAELRADYQSATSEHSKAGILGYVDSVNPAQAASLK

SEQ ID NO: 2015 - protein, 251 aa, synthetic construct
  source 1..251: note = MG160-492 reverse transcriptase ancestor
MTQKWTHRYQLKPGRWVFAPTDEAKKTGARIKRAVAAHWKPPNFYFHLRNGGHVAAVRSHVASKYFFRADLDDFFGRVNRSRVTRCLKSWFSYAEAREMASESVVKRPGHNGFVLPYGFVQSPILASLALDKSKLGSYLRKLNGRSDLTVSVYVDDIIISSDDESQLGEVAARLKQLADKALFPLSASKTEGPASGVTAFNIELSHAALRITDERLAELRADYQAAASEHSKAGILSYVHSVNPAQAASLK

SEQ ID NO: 2016 - protein, 251 aa, synthetic construct
  source 1..251: note = MG160-493 reverse transcriptase ancestor
MSQKWTHRFEIKPGKWVFVPSDESRQHGKKIKKQIEKRWKPPDYYYHLRNGGHVAALKSHLNNKYFLRLDIKNFFGSINRSRVTRALKKFFSYEEAREIANESTVRHPNNKKYILPFGFVQSPILASLCLDKSALGRYLHKLNKNNGITVSVYMDDIIISSNDQEQLQEVLEEIKTAAEKSGFPLNEEKTQGPSDKITAFNIELSHGNLKITDERMNEFMEAYKNSNSEHQREGILNYVRSVNPAQAEQLA

SEQ ID NO: 2017 - protein, 251 aa, synthetic construct
  source 1..251: note = MG160-494 reverse transcriptase ancestor
MMEKWKHKFEIKKDRWVYVPSKEMLQFGKKIHKYIRKKWKPPLYFYHLRDGGHVAAAKLHLNNKYFALIDISNFFESTSQSRVTRELKKFIPYEKAREIAKLSTVRNPNSTKYVIPYGYPQSPILATLCLHNSYCGNVINSINKSGNVTVSVYMDDIIISSNDLNLLNEAFDLILEALEKSGYQINENKTQSPSKKIKVFNLELSHNSLRVTPKRMVEFLQAYAKSKNEHEREGIASYVGSVNPQQAKLFP

SEQ ID NO: 2018 - protein, 251 aa, synthetic construct
  source 1..251: note = MG160-495 reverse transcriptase ancestor
MMEMWKHKFEIKKDRWVYVPSKEMLQFGKKIHKYIRKKWKPPLYFYHLRNGGHVAAAKLHLNNKYFALIDISNFFESTSQSRVTRELKKFIPYEKAREIAKLSTVRVPNSKKYAIPYGYPQSPILATLCLHNSYAGNVIDSINKSGNVTVSVYMDDIIISSNDLNVLNEAFDLICTALEKSKYQINEDKTQSPSKKIKVFNLELSHNSLRVTPKRMVEFIQAYAKSENEHEREGIASYVRSVNPQQAKRFP

SEQ ID NO: 2019 - protein, 251 aa, synthetic construct
  source 1..251: note = MG160-496 reverse transcriptase ancestor
MMEMWKHKFEIKKDRWVHVPSKEMVLFGKKIHKFIRRKWKPPLYYYHLRNGGHVAAAKLHLNNDYFALIDISNFFESTSQSRVTRELKKIIPYNKAREIAKLSTVRVPNSKKFSIPYGYPQSPILATLCLHNSYAGNVIDSINKSGNVTVSVYMDDIIISSNDLNVLNEAFDLICTALKKSRYQINVDKTQSPSKKIKVFNLELSHNHLKVTSKRMVQFIQAYAKSENEYEREGIAAYVRSVNPQQANRFP

SEQ ID NO: 2020 - protein, 251 aa, synthetic construct
  source 1..251: note = MG160-497 reverse transcriptase ancestor
MMEMWKHKFEIKKDRWVHVPSKEMVLFGKKLHKFIRRKWKPPLYYYHLRNGGHVAAAKLHKNNDYFSLIDISNFFESTSQSRVTRELKKIIPYEKAREIAKLSTVRVPNSKKFSIPYGYPQSPILATLCLHNSYAGNVIDSINKSGNVTVSVYMDDIILSSKDLNVLNEAFDLICTALKKSRYQINVDKTQSPSKKIKVFNLELSHNHLKVTSERMVQFIQAYAKSQNEYEREGIAAYVRSVNPQQANRFP

SEQ ID NO: 2021 - protein, 251 aa, synthetic construct
  source 1..251: note = MG160-498 reverse transcriptase ancestor
MMEMWKHKFEIKKDRWVHVPSKEMVLFGKKLHKFIRRKWKPPLYYYHLRNGGHVAAAKMHKNNDYFSLIDISNFFESTSQSRVTRELKKIIPYEKAREIAKLSTVRVPNSKKFSIPYGYPQSPILASLCLHNSYAGNVLDSINKSGNVLVSVYMDDIILSSKDLNVLNEAFDLICTALKKSRYQINIDKTQSPSKKIKVFNLELSHDHLKVSSERMVQFIQAYAKSQNEYEREGIAAYVRSVNPQQANLFP

SEQ ID NO: 2022 - protein, 251 aa, synthetic construct
  source 1..251: note = MG160-499 reverse transcriptase ancestor
MSQPWTHRFEIKPGRWVYVPSDESRQHGKKIKKQIKKRWKPPDYYYHLRNGGHVAALKSHLNNKYFASLDIKNFFGSISRSRVTRALKKFFSYEEAREIAKQSTVRHPNNHKYSLPFGFVQSPILASLCLDKSALGRYLHKLNKNKGITVSVYMDDIIISSNDQEELQEAFEELKEAAEKSNFPLNEEKTQGPSDKITAFNIELSHGNLKITDERMSEFMEAYQNSNSEHQREGILSYVRSVNPAQAKQLA

SEQ ID NO: 2023 - protein, 251 aa, synthetic construct
  source 1..251: note = MG160-500 reverse transcriptase ancestor
MSQPWTHRFEIKPGRWVYVPSDESREHGKKIKKQIKKRWKAPDYYYHLRNGGHVKALKSHTNNKYFASLDIKNFFGSISRSRVTRALKKRFSYEEAREIAVQSTVRHPNNHKYSLPFGFVQSPILASICLDKSALGRYLHKLSKNKGLTVSVYMDDIIISSNDQEELQEAFDELKEAAEKSNFPLNEEKTQQPSDKITAFNIELSHNNLKITDERYSQFMEAYQSSNSEYQREGILSYVRSVNPAQAKQLK

SEQ ID NO: 2024 - protein, 251 aa, synthetic construct
  source 1..251: note = MG160-501 reverse transcriptase ancestor
MNQPWKHRFEIKPGRWVYVPSDESLEHGKKIKKQIKKRWKAPDYYYHLRNGGHVKALKSHTDNKYFASLDIENFFGSISRSRVTRALKKRFSYEQAREIAVQSTVRHPNNHKYSLPFGFVQSTILASICLDKSALGRYLHKLSKNKGLTVSVYVDDIIISSNDQEELQKAFDELKEAATKSNFPLNEEKVQQVSDKITAFNIELSHNNLKITDERYSQFLEAYQSSNSEYQREGILSYVRSVNPAQANQLK

SEQ ID NO: 2025 - protein, 251 aa, synthetic construct
  source 1..251: note = MG160-502 reverse transcriptase ancestor
MNQPWKHRFEIKPGRWVYVPTDESLEHGKKIKKQIKKRWKAPSYYYHLHEGGHVKAIQSHTDNKYFASLDIENFFGSISRSRVTRSLKKRFSYEQAREIAVQSTVRHPNEHKYSLPYGFPQSTILASICLDQSALGRYLHSLSKNRGLTVSVYVDDIIISSNDQEELQKASDELKEAAVKSNLPFNKEKVQQVSDKITAFNIELSHNNLKITDERYSQFLEAYQASNNEYTREGILSYVRSVNPAQANQLR

SEQ ID NO: 2026 - protein, 251 aa, synthetic construct
  source 1..251: note = MG160-503 reverse transcriptase ancestor
MTLPWKDRFQVKPGRWVYIPTQETLEQGRQIKALVAEKFQAPSFYYHLHEGGHVAAIQSHTDDRYFLNVDIENFFGAINRSRVTRSLKKRFPYAQAREITVQSTVRVTNEYEYHLPYGYPQSTILASICLFDSALGRYLHSLSAQHNLTVSVYVDDIIISGNDHAELQQISDTLVEKSVASRLPFGRKKVTQVSDRITAFNIELSHHTMKITDQRYNQLLQQALLTDNENVIEGILSYVRSVNPRQHNNMR

SEQ ID NO: 2027 - protein, 417 aa, unidentified
  source 1..417: note = uncultivated organism;MG165-10 reverse transcriptase
MHATNKPFNIEKRWVYEAYKAVKSNRGAAGVDEQTIEQFDADLSGNLYKIWNRMSSGTYFPPPVRAVAIPKKSGGERILGVPTVADRVAQTVAKMVIEPILDPIFLADSYGYRPKKSALDAVGATRERCWKYDWVLEFDIKGLFDNIDHELLLRAVRKHITCKWALLYIERWLKAPMVQEDGTMIERSRGTPQGGVVSPILANLFMHYTFDLWMARTHPDLPWCRYADDGLVHCRTGHEAEALKAELQVRLAECHLEMHPTKTKVVYCKDGKRKGKYPNVKFDFLGYCFRPRLVRNFRDNSLFGGFNPAVSPSAMKVMRQAVRDLNIRRQTQLSLQDIAQKLNPLLRGWIAYYGRYAPSALYPLLRYVNQRLVAWAMRKFKRFKRHKVQASQFLERLATECVDIFVHWQIGMTGVFA

SEQ ID NO: 2028 - protein, 406 aa, unidentified
  source 1..406: note = uncultivated organism;MG165-11 reverse transcriptase
MIDYYETRSQPITRKMVWQAYQKVKSNKGSFGVDKMDWVTLDGNVNSHLYKLWNRLSSGSYFPEPVREVAIKKKSGGVRKLGIPTLLDRIAQEVVKTHLERIVEPQFHHSSFGYRPNRNCHQAVEKATQNAFTHCWAIDLDIKSFFDTIDHSLLMKAVEHYCTDKWVRLYVHRWLRAGIVQQDGCYVDRTSGTPQGGVISPLLANIFLHVTFDKWMEQHHERKPFERYADDIVVHCKTERQSKFLLKEIRQRFSQCKLSVHEGKTKIVNIRGSSEKKYKMSFDFLGFTIQPHFVKVKGNVKRILPRSIISKKSVSSVLDKFKGIHKRRVSIEELARELNPVIRGVMNYYCKFWTYHTHEMWAQLNEKLKKWVKWEKRLYKMASVRWLQQKYVNHSNLFAHWKLVRP

SEQ ID NO: 2029 - protein, 424 aa, unidentified
  source 1..424: note = uncultivated organism;MG165-12 reverse transcriptase
MTQNKKKSYEISKYAVYQAYLKVKEKRGSAGVDNVDWKTFEGRLQDNLYKIWNRMSSGCYFPKAVKRVEIPKKDDGSKRPLGIPTIADRIAQMVVKDRLEGTLEKIFHPNSYGYRPNKSCGDALEAARRMCWTKAWVIDVDIKGFFENIDHDLMMKAVYHVTGCKWAVLYIERWLKGTVSIDGKIENPSKGTPQGGVISPLLANLYLHYAFDMWMERYFESIAFERYADDIVIHFSSEQQAKMIWYSLVKRMKECGLELHPDKTKIVYCRDGNKGKSRKASSFDVLGFTFKLRQTVDKRGKRFIGFNPSISKSGKKSIMDKVKGWSLNKRVGLNLSYIAKRVNPQIRGWKNYYGQFRSYDLMGIWLYIDRKIMKWAMKKYKGLRKSSKKTWNWLLGIVRSKPYLFEHWRYLHKSFLLSGRSRMN

SEQ ID NO: 2030 - protein, 416 aa, unidentified
  source 1..416: note = uncultivated organism;MG165-13 reverse transcriptase
MDKAKPFCIPKRWVWEAYKRVKANRGAAGVDEQSVAEFEVNLKGNLYKLWNRLSSGSYFPPPVKRVEIAKRDGGTRPLGIPTVTDRIARAVVKAYLEPAVEKHFHPDSYGYRPGKSALDAVGVARERCWRHAWVLDLDIRAYFDTIPHDLLLRAVRAHTDCAWVLLYIERWLKAPAQLDDGTLVPRERGTPQGSVVSPLLANLFLHDVFDRWMDKYHPNIPFERFADDVLCHCVSEAQARWLKGVLERRFAECGLELHPQKTKIVYCKDDDRRGHYPNETFDYLGYTFRARRSKNRWGKYFVNFSPAVSNAAAKRMRQAIRDWQLGCRVDKGIDDLARMFNPIIRGWLTYYGRYYPSALYPTLRYLDGRLARWAQAKYKRLRRHRRRSEHRVRAIAHRAPGLFAHWRLLHRAAAGR

SEQ ID NO: 2031 - protein, 414 aa, unidentified
  source 1..414: note = uncultivated organism;MG165-14 reverse transcriptase
MEEGKSFKISKHRVLEAYKRVKANRGAAGIDEISLTEFEKDLKDNLYKIWNRMSAGSYFPPAVKAVEIPKKSGGKRILGVPTVADRIAQMTVKLYFEEMVEPHFHQDSYGYRPGKSALDAVAITRKRCWNYDWVLEFDIKGLFDNIDHELLMKAVRKHTSSKWIILYIERWLKAPFQMAGGTVVQRTAGTPQGGVVSPVLANLFLHYAFDKWMDRNAPENPFARYADDGVVHCRTLKEAEELLVRLGQRFEECKLELHPDKTRIVYCKDDRRNGKHPETKFDFLGYTFRSRLSKNNQGKYFVGFNPAASKSACQNLRDRIREIRFKNKIVTIEELAALMNPVIRGWLNYFSKFRASDARRELIFVNFALTRWIRRRHKKAGKSLKKAYRILGLTAKTNPNLFYHWSLGLQPTIG

SEQ ID NO: 2032 - protein, 419 aa, unidentified
  source 1..419: note = uncultivated organism;MG165-15 reverse transcriptase
MIFVEEQKTQPITRLQVLEAFKRVRANGGSAGVDGITTAQVEGNKRKYLYPLWNRMASGSYYPKPVRQSLIPKANGKKRALGIPTVMDRVAQQVIATELEHDIDNRFSRNSFGYRPNRSAHDAVGQCRINCMKYSWVIDLDIKGFFDNIDHELLMKGLRYYTSKKHILLYCERWLKAPVQLPDGTLKPSEGRGTPQGGVISPILANIFLDIVFDKWMEKHYPDVAFERYADDIVVHCQHFKQALRLLEAIKQRMKDCKLELNREKSKIVYCRRNQKNQPPFKVHYQKFDFLGFTFKPRISMMNGKLKLGFSPAISSRNIARISDEIFKRKIHRWVHFPLSKIAELLNPQIRGWVNYYSRFRKSELRKLFRVINMRLVKWIRNKYRKFRHRHWYNAYKYLWGIAQRYPYLFVHWQFGYLP

SEQ ID NO: 2033 - protein, 415 aa, unidentified
  source 1..415: note = uncultivated organism;MG165-16 reverse transcriptase
MQTTKSYTISKQTVLEAYKRVRAKRGCAGVDEEMISDFESNLKDNLYKIWNRMSSGSYFPPAVKVVEIPKSNGKTRSLGIPTVSDRIAQMVAKMYLEPKVDRVFHEDSYGYRPNKSAIEALGVTRKRCWEYDWVLDADIKGFFDNIDHELMMRAVRKHTSCKWVLLYIERWLKSPAINVEGTQVKRDKGTPQGGVISPLLANLFLHYAFDEWMKRNYPNNPFERYADDIVVHCSTESGSESLKKAVEPRLKHCRLELNLEKTKIIYCKDDRRRGEYPLRKFDFLGYTFRSRRVKSGKGEYFVGFNPAVSNDAKKLLRKKVKHLVIQYRNKAKLEDLSEIINPVLRGWVNYFGKYRRTEILFTLYGVNETLVWWARKKYKRLKASHGRAYRWVGRIAKQEPSLFVHWSMGCGPVIE

SEQ ID NO: 2034 - protein, 415 aa, unidentified
  source 1..415: note = uncultivated organism;MG165-17 reverse transcriptase
MDKTKPYDIPKQTVWDAFQRVKANKGAAGVDEETIGEFEKDLKGNLYKIWNRMSSGSYFPPAVKAVEIPKKSGGVRILGIPTVSDRVAQMVVKLHFEPKVEPIFAADSYGYRPGKSATDALRITRGRCWRYDWVIELDIRKLFDRIDHELLMKAVRKHTDSAWEILYIERWLKAPFQMQNGSKVERTMGTPQGGVVSPVLANLFMHYAFDEWMRREHPNNPWARYADDAVIHCRTQKEAKSLLIDLGERFKQCKLELNTEKTRIVYCKDDDRKGNYSLTSFDFLGYTFRPRRSKNRWGKCFINFSPAVSNSASKAMRQTIRGWRMQLKSDVGIDDLSRMFNPVVRGWINYYGCFYKSQLYSVLRHMNRALMYWARRKYKKLAVHKRRASSWLGRLARNRPELFAHWQMGILPTVG

SEQ ID NO: 2035 - protein, 416 aa, unidentified
  source 1..416: note = uncultivated organism;MG165-18 reverse transcriptase
MSATKPFSIPKELVWRAYKLVKANRGGSGVDRQSLEDFESKLKDNLYKLWNRMSSGSYMPPPVKAVPIPKKSGGERILGVPTVADRIAQMVVKLVFEPEVEPVFLPDSYGYRPGKSALDAVGVTRERCRRWDWVLEFDIVGLFDNIPHDLLLKAVRKHTDVRWVQLYIERWLRAPMVYPDGRREARCRGTPQGGVVSPVLANLFMHYAFDAWMARAHATNPWCRYADDGLVHCMSERQALVLRASLQSRLAECGLEMHPDKTRIVYCQDDRRKVDYPRKQFDFLGYTFRARVVRLSQPTRFFVSFSPAVSKASSKAMRAYIRRSAIRNWTNLSLDDIARGFNPAIRGWLQYYGRYRRSELYPVLRHFNLTLVAWAMAKFKRFRRSRTRASRWLIQLSKRDPCLFAHWKVGMAGSFI

SEQ ID NO: 2036 - protein, 420 aa, unidentified
  source 1..420: note = uncultivated organism;MG165-19 reverse transcriptase
MKQDDPRPKAKPFEIPKLLIYNAWKCVAANKGAPGVDKESIKAYQSNLGGNLYKLWNRMSSGSYHPQPVRQVLIPKGDGFRSLGIPTVADRTAQMAVKMILEPRLEQIFHPSSYGYRPGRGAKDAVAQVRRNCWRYDWVLDMDIKAFFDTIDHELMMRAVEKHVPEKWIRIYIRRWLECPIQLEKGELQSRSCGTPQGGVISPLLANLYMHYAFDHWMRLNNPGILFARYADDVVCHCRTRREAEILLEYLKERLENCKLQLHPVKTKLVYCKDNKRKGTYPLTRFDFLGFSFHGRTVQDRKGNLFTGFNPGVSRKSLKRMNESLRSLKINRNTRSTLPDLAEQINPMVRGWIAYYGAFYPEPLKKFLIRIELRLGRWARNKYKRLRGHKRRSWNWLKRYRATAPRMFVHWDYLFMKGHG

SEQ ID NO: 2037 - protein, 418 aa, unidentified
  source 1..418: note = uncultivated organism;MG165-20 reverse transcriptase
MTRVAEAKSFDIAKREVWEAYKRVKANPGAAGGDGVTIAMFEQDLSKNLYRIWNRMASGSYLPPPVKRVDIPKGDGKTRPLGIPTVADRIAQMVVQRRLEPLLEPVFHANSYGYRPRRSAHDALRVARNQCWRHDWVLDLDIKGFFDNIDHDLMMKAVRRHTDCRWAVLYIERWLKADVLMPDGMLTTRDKGTPQGGVISPLLANLFLHYAFDQWMVRHHPKVPFERYADDIICHCDSQAEATSLRAELEARLAACRLELHPEKTRVVYCADANRRGEHPDRRFDFLGYTFKPRQAMNRRGRLFTSFSPAVGDKAGKAMRHEIRGWGLQRLNRYDLDELLARIRPVLVGWVRYYGLFHPSSLQRALKPLDHDLVRWAQRKYKKLRGRYMRAWDWLRALRQRAPTFFPHWSAAIMTTER

SEQ ID NO: 2038 - protein, 415 aa, unidentified
  source 1..415: note = uncultivated organism;MG165-21 reverse transcriptase
MPKRKDKPFVIPKQMVWEAYQRVAANKGAPGVDRETLEEFETDLAGNLYKIWNRMSSGSYFPPPIRAVEIPKPHDDGVRKLGVPTVADRIAQTVVAKYLEPTVEQKFHPDSYGYRPGKSALDAIETCRRRCWKHDWVIDFDVQKFFDEVPWDLVIKAVEAVTDCRWVLLYVKRWLAAPWQRSDGTLAERDKGTPQGSAVSPVLANLFMHYAFDMWMSRNFPGSPFERYADDAVVHCNSRRQAELVLDQIAARMREVGLRLHPDKTKIVYCKDSNRRREHRHITFTFLGFSFRPRGAVNKRRGGMFTSFLPAISPEALKAKGDRLRELRIQRRTDLSLDDLARWLNPIVAGWMNYYGRYYRSALYPLLWRVSFYLRRWAGKKYKRLRTYKRFKRWWMGVLEREPCLFAHWQWVRSP

SEQ ID NO: 2039 - protein, 414 aa, unidentified
  source 1..414: note = uncultivated organism;MG165-22 reverse transcriptase
MQEAKPYSISKKAVIAAYQKVKANKGTYGVDEQSIEDFERKLNNNLYKIWNRMSSSTYFPQPVKAVVIPKKNGGTRILGIPTVEDRIAQMVAKLYFEPNVEPIFYEDSYGYRPNKSAIQALEVTRMRCWRKDWVLEFDIRGLFDNIRHDYLMEMVKRHTQEKWILLYIERWLRAPFQMEDGTIVERTSGTPQGGVISPVLANLFLHYVFDDFMEKEFPTIPWARYADDGIAHCVSLKQAKYLKRRLEQRFRDYGLELNLEKTRIVYCKDDDRRGSHENTSFDFLGYTFRPRHAKNRYGKFFTNFLPAISEKAKKSIRKEVRGWKLQLKPDKDLYDIANMFNRKIQGWINYYTHFYKSEIYDVLRYINGCLVKWVRRKYKKRGARRRAEHWLGEVAKRDRNLFAHWKFGILPSAG

SEQ ID NO: 2040 - protein, 439 aa, unidentified
  source 1..439: note = uncultivated organism;MG165-23 reverse transcriptase
MRWRCLGNGMDQLGNEDEPVTNLKPYDIPKRRVLEAYRRVKANRGAAGIDGESLEMFEADLTGNLYKLWNRLSSGSYFPPPVKQVEIPKKNGGVRVLGVPTIADRVAQQIVVARIGGDLYGVFHPDSHGYQLDKSAVEAVANTRKRCWEYDWVVEFDIRRAFDELDWDLLRKAIAKHIKDPWCLLYIERWLTASAVSPDGQTVQRTKGVPQGSVVGPVLMNLFMTYAFDEWMKREHPANPFSRYADDAVAHCRSEAEAKQLLAAIEERLKECKLELHPEKSGIVYCKDSNRRKEYPKTSFTFLGYEFRPRSAKSRDGRTWTSFQPAISASAMKRIRQAIREWNLPRQTSVSLNELARQYNTQIRGWMNYYSHFYQSALYRLYDHIDQKLVRWAQRKYRKLAGKPTWARAWLKKVVGRQPRLFVHWLAHGKVAVRTMGAV

SEQ ID NO: 2041 - protein, 424 aa, unidentified
  source 1..424: note = uncultivated organism;MG165-24 reverse transcriptase
MKAAKSFEIRKRQVWEAYQLVKANRGSAGIDQVTLKEFEKDLSGNLYKIWNRMSSGSYIPSPVKLVEIPKADGKKRPLGIPTIADRVAQMVAVQILGPSIDPHFHENSYGYRPGKSAHQALEVAKEQCRKHRWVIDLDVSKFFDTIDHGLMMKALIRHTNTKWILLYVERWLTCPYELKDGSQIARNQGVPQGSVIGPLLSNLFLHYVFDQWMRKTYPEIPFERYADDIVCHCPTQVSSSKVLSAIDHRFSTCGLSINKDKTKIVYCKDSNRNERWGEIQFDFLGHTFRPRAVKSKIGEYFTGFNPAMSNNAKKKICEKINSWDVNQWVGWALTLEDIADKINPIIRGWINYYGKFYPSLLRKHLRHVDLRLALWARTKFKRLKRHKRKSIHWLGVIAKSNPNLFAHWQWGYKPSAGVIYPAGD

SEQ ID NO: 2042 - protein, 418 aa, unidentified
  source 1..418: note = uncultivated organism;MG165-25 reverse transcriptase
MEELKSSGKPFDISKTEVWDAWIKVKGNQGASGVDGQSLTAFEKDLKNNLYRIWNRMSSGTYFPPPVKAVEIAKAHGVGTRMLGVPTVGDRVAQTVVAAHLGARVEPVFHPDSYGYRPERSALDAVGACRKRCWEYDWVIDLDIRKFFDSVRWDLIVKAVEKHTDARWVVLYVKRWLAADQQLPDGSLQGRDRGTPQGSAVSPVLANLFMHYAFDVWLTREFPTVAFERYADDAVIHCITRAHANKVLGALHQRMAEVGLELHPDKTKIVYCKDSNRRGDFEHTSFTFLGFTFRPRQARRRDGIKFTSFLPAISKEALKKIGARVRSWRLHRHTGSSTADLARMINPVVRGWMAYYGAFYRTALYPVLHRINTYLLRWIMKKYRKLRTWKKAIQSMSNAAANQPRHFAHWTWAKPATR

SEQ ID NO: 2043 - protein, 415 aa, unidentified
  source 1..415: note = uncultivated organism;MG165-26 reverse transcriptase
MEEERTKSFPVSKRMVYESYLKVVSKNGGAGIDRESIEMFNANMSKNLYKIYNRMASGSYLPPAVRTVFIPKKQGGFRPLGVPTVADRIAQGVVKDYLEPEMDKLFHGSSFGYRPGRSAHDALGQCHANCLQYAWVIDVDIKGFFDNISHEKLMELLKRHTQQRWVLLYVERWLKAGIEQEDGSIIERTKGTPQGGVISPLLANLYLHHAFDKWMEQSKVNNPFERYADDIVIHCCSKEEAEKLLAALEERMSEYSLTLHPEKTKVVYCKNYRRNEDYDQNSFTFLSYTFRPRAAKDKFDPKKLIVLFNGAISNAAKTSIRKAIRKVLNPKWVNGTLEGLANVLNPKIRGWINYYGKFFKWRMIKVFHYLDGLIQRWLANKHRFTSKAKTIETFQRIKEEFPVMFYHWKFGIKQD

SEQ ID NO: 2044 - protein, 417 aa, unidentified
  source 1..417: note = uncultivated organism;MG165-27 reverse transcriptase
MSETKPFSIRKQWVLEAYLKVKSNKGSGGVDGISLKEFGEQYKKYLYKLWNQMSSGSYLPPPVRLKEIAKKDGGVRPLGIPTVADRIGQTVVKELLEPVLEPLFHEDSYGYRPGKSAVDAVAKARVRCWKQAWVIDLDIKGFFDNIPHDLLMKAVRRHCDCKWMILYIERWLVAPLQLEDGTIIARTKGVPQGSVIGPILANLYLHYCMDIWLARKHPHCPFERYADDAIIHCSTEQEGLRVMKALEERLQQCGLQLHPMKTKLVYCRDSNRKGTYPNVTFDFLGYTFKPRQAQNSIRKETFTNWLPAVSTKAMKSMNEKMHGWKVLQQTGNTIQEIALKINPVLRGWINYYGKFYKTKLKDFMHIVNVKLASWARRKYKHLRTSEMKAIRWLHGISLRRPGLFAHWSLLGSKPTVG

SEQ ID NO: 2045 - protein, 416 aa, unidentified
  source 1..416: note = uncultivated organism;MG165-28 reverse transcriptase
MNLWNETKSIPISRPMVWEAYKKVRSNQGSAGIDQISMDEFDAERSKHMYKLWNRMASGSYFPPPVKEVGIPKKDSKIRKLGIPTIGDRVAQMVVKEYLEPRFEQIFSPQSYGYRPNRNAHQALESVRSNCKKTDWVIDLDIKGFFDNIDHGKLLLAIEKHVSEKWCILYIERWLQMPVQTKSGELIHKQGKGTPQGGVISPLLANLFQHYAMDKWLEQTHPTVSYVRYADDAILHCRKKAQAEEVLKTLKERMQGCRLELHPEKTKLVYCRDYRRQENHETVKFDFLGYSFQPRSTMSKRTGKLFLGFDCAISIGSKKRIADKMKELNIDHLSHKSIVGVALYLEPFIRGWINYYGRFRLWALKSIFQLLRKRLIMWALKRYKRYKTNLNKAYEWLKRVKEQFPNLFYQWKLGFS

SEQ ID NO: 2046 - protein, 417 aa, unidentified
  source 1..417: note = uncultivated organism;MG165-29 reverse transcriptase
MSEPRPKTAKPFDISKWAVLEAYQRVKANQGAAGVDGQSIEEFEENLKGNLYKLWNRLSSGSYFPPPVRAVEIPKKSGGQRTLGVPTVSDRIAQTAVRLYLEPEVEPLFHPDSYGYRPGRSALDAVGRCRGRCWKYDWVIDLDLRSFFDSIPHDLLMKAVSKHTDQRFVLLYIERWLVAPLEKADGSLVERDRGTPQGSAISPLLANLFLHYAFDTWMAREFSGCPFERYADDAVIHCASEAEAQMVLDALARRLAQVGLELHPDKTRIVYCKDANRKGSFEHEQFTFLGYTFRPRLTKNKRGQFFVSFLPAMSDDAGKAIRQEIRRWRLNVHSDKSLGDLASFVNPIVRGWCRYYGRFYKSRVYRSLGRINDYLVRWARRKFKRLRTSVRRAWRWLRGVQRRSPELLAHWAFGALA

SEQ ID NO: 2047 - protein, 467 aa, unidentified
  source 1..467: note = uncultivated organism;MG166-6 reverse transcriptase
MMPPKETRCAEGRGRPEGELRENARVRTQSRVALRSNLARVNEAARKDKSARFTALLHHADVSALERAFHRLKRSAAPGVDGETVASYEQELAQNLERLHAQIHSGRYQPQPVRRVYIPKADGGRRPLGVTALEDKIIQGAVAEVLSAIYEVDFLGLSYGFRPGRSPHQALGALHTALMTQEVSWVLDADVRSFFDSVDHEWMLRMVAHRIADRRILRLIRRWLRAGVMEGQRWSETVQGTPQGSGISPLLANIFMHYALDLWVHQWRKRYARGRVIIVRYCDDFVMGFQYEADARRMLADLKECLAKFKLALHEEKTRLIEFGKRASELRRKCGARRCETFRFLGFTHYCAWSRGGRFVVKRRTERMRLTRKLKELGIQARRRMHTPVVLQYQWLCSVLRGHYAYFGLPSNWDRLGAFYQETRRIWHRALNRRSQRRLSWERYVRLLERFPLPVPRITHPRPVAAC

SEQ ID NO: 2048 - protein, 492 aa, unidentified
  source 1..492: note = uncultivated organism;MG166-7 reverse transcriptase
MMHGLEKSDSSIRAKKSANKPGRPGAESMEQREGTKENTGESPASRTLSREIVTGGLDRVRQAARGNKKERFTALMHHVTIDLLRQAYYWLKRSAAPGVDGVTWHDYEDNLEAKLTDLHTRVHRGSYHPMPSRRKYIAKPDGRKRPLGIAALEDKIIQRAVVEVLNAIYEQDFLGFSYGFRPGRGQHDALDALAVGISQRHVNWILDADIAAFFDTVSHDWMLRFLEHRIGDRRLLRLIGKWLKAGVMEEGVVSATETGTPQGAVVSPALANVYLHYVFDLWAHRWRQQQARGAVIFVRYADDVVAGFEHEGEARRFLVELRQRMEKFALSMHPTKTRLIEFGRYAAERRGKRGLGKPATFNFLGFTHIAGRTQKGRFQLIRKTRRDRMRAKLKAIKEELRRRMHHSIPQQGQWLRQVVRGYFAYHAVPTNLQSLSAFRYFVGRLWLKTLRRRSQKNRFSRDRLTRLAADWLPSPRILHPWPDARFVVKHPR

SEQ ID NO: 2049 - protein, 432 aa, unidentified
  source 1..432: note = uncultivated organism;MG166-8 reverse transcriptase
MSTQLDQIVGKAKSDSKCRFTSLAHLITPGFLKETWKQMNRRGASGVDGETMQEFERDLDRRVRCLGERLRQGTYRAPPVRRVDIPKGPGKEGTRPLGIPTVEDRLLQRAVARILEAVFEADFLDCSYGFRPGRNPHGALRALRGIVVTKKVGHLFEADIRGYFNHIQHDWLLKMVAHRIGDPVILRLIGKWLNAGFMVGGVVTRTEEGSPQGGPISPILANIYLHYVLDLWFEKTVKPRCKGEVYLTRFADDFVVNFQYQRDAERFRKGLTNRFTKFGLELAEEKTRLMRFGRFVRTDREKTGEKPETFDFLGFKHVCGVGQGGKFALVRIPCVKSCRKFLAKSKEWLKRHMHWKRRDQRRQLVTMLRGFYQYFGLHHCKPKLDHVRREVQRQWRHSLRRRSQRHCMYWSYLKSRSWFDLPYAGSTRHGTV

SEQ ID NO: 2050 - protein, 433 aa, unidentified
  source 1..433: note = uncultivated organism;MG166-9 reverse transcriptase
METKLIRIQQLSAQNHNMVFTSLFHMINKDLLKECHRRLDGNKAMGMDEVSKDEYERNLDENLDKLIQSLKTHSYKPKPALRVYIPKANGKKRPLSISCYEDKLVQYALKCVLEAVFEPLFLENMYGFRPEKGCHDALKALTNTIEKQQVAMVLDADIRGFFDNLDHEWIIKMVKVHIKDPNIIWLLRKILKAGYIEDGQKHETMRGAGQGSLCSPIIANIFMHYVMNLWYWKKIKPVLKGSSNIIIYADDFVGCFQYKNDARRFYEILRERMTEYGLELEPTKTRLIEFGRFAEQNAKAKGKKAEIFRFLGFIHYCGISQNGRFRVKRKADSKKFNAKVAEMKKWLQQNRSKRLKEMIPMINRKLLGHYHYFGITDNFYGIKRFYEIVHNMLYKWLNRRSQKRSYNYKQYEAMLKVYPLAKPKIYVNIYEAV

SEQ ID NO: 2051 - protein, 498 aa, unidentified
  source 1..498: note = uncultivated organism;MG166-10 reverse transcriptase
MNADGKSDGTVVPSTQANKAETESAAESVEGRDRPAKRNVSESDLLRTPSRAKRRSLGLAGVRETARTNPELKFTALLHHVNEDLLTSAFFDLKKTAAVGIDEVTWYDYEQGLEERIADLHGRIHRGAYRAKPSKRIYIPKPDGRQRPIGIASLEDKIVQKATVWVLQCIYEQDFLGFSYGYRPGQSQHKALDALTVALTSKKVNWVLDADVEGFFDTIDHSWLIKFLEHRIGDSRVLRLIRKWLRAGISDDGEWSETRMGTPQGAVISPLLANVYLHYVFDLWIQWWRSKRSRGDIVVIRFADDFVVGFEHKYEAEACLAEMRERFAKFGLRLNDKKTRLIEFGRYAAARRKARGLSRPETFDFLGFTHRCGVTRRHGWFAIHRETVAGRLRATLAAIKAKLIHRRHWELGAVGGWLARVMRGWLGYHAVPGNMPRLQQFRDEIAKLWLAVLRQRSQRHRWPWSRMQTLVRRFLPTPRIIHPYPDQRFRARLEAGAV

SEQ ID NO: 2052 - protein, 502 aa, unidentified
  source 1..502: note = uncultivated organism;MG166-11 reverse transcriptase
MMNGRGKSDSLVVPAKPSNRGGSTAAPPAEGVEERRLAKGNPRKHDRPRAQTRLDLQSALERVREAAVRDRELRFTNLWFHVCEVERLREAYLALKRDAAPGIDGVTWREYGRSLEENLRDLSARLKSGAYRAKPVKRVYIPKPDGRQRPLGVTALEDKLAQRATVEVLSAVYETDFLGFSYGFRPGRSAHQALDALAVGIQTRPVNWVLDADIRGFFDAIDHECLMGLVERRIVDVRATRHIRKWLNAGVLEKGKLEVQEAGTPQGSSLSPLLANIYLHYAFDLWANEWRRERARGTVTIVRYADDFLVGFEHRDEAERFLAELRERLAGFHLELHPEKTRIVAFGRRADDEWRGGSGPKPGTFDFLGFTHTCDRTRTAGRFIVLRQTMRKRLTAKLAAMKQWLRKHLHDPVPLVGAHLERVIRGHVQYYGVPRNGPALRAFIKGLARLWYMALRRRSQKTRMTWNRMYRLLRAHFPPPRIVHPYPEQRFAVMTRGKSPVR

SEQ ID NO: 2053 - protein, 520 aa, unidentified
  source 1..520: note = uncultivated organism;MG166-12 reverse transcriptase
MHENRETLETPVAEPGNRPAGEGKSRTARMNVSEESHSGVVPMNHSNKNGRPLAESEEGRPLIKENARQPNTYPTQSGESVSQGLAGVRKAARENKEMKFTALLHHLTVDLLRESFYSLRRKAAPGVDGVTWQEYEVGREERLTDLHGRVHRGAFRALPSRRVYIEKEDGRQRPLGIAALEDKIVQQAVVTTLNQIYEEDFLGFSYGFRPRRSQHDALDALSYALLKRKVNYVLDADIRGFFDNLDHSWLIKFVEHRVADPRILRLIQKWLKAGVMEEGKWSEAKTGSPQGSVISPLLANIYLHYAFDLWVNVWRQKWAQGEVVVVRYADDTIVGFQYQTDADRFLENLRERLARFGLELHPDKTRRIEFGRFAEQNRKRRGEDKPETFDFLGFKHISAKNGIGRFTVRRTTIRKRMRAKLRQIKQELRARMHDPVPRTGEWLKSVVQGYFNYYAVPGNLESLAVFRDRTLGLWWRRLCRRSQKRRISWTRMLSLGKRWLPQPRVLHPYPADRFAASHPR

SEQ ID NO: 2054 - protein, 461 aa, unidentified
  source 1..461: note = uncultivated organism;MG166-13 reverse transcriptase
MERRGTHSTACSMETLPTLRGGTTAIPGVERIAQRARQQPETCFSTLMHHFSVDNLRVCFESLDGKKAVGIDGVTKEQYGEALEDNLQRLHQKLHQLSYRPQAVRRVEIPKEDGSTRPLGISCLEDKIIQAMTRRILEAIYEPTFLDTSYGFRAGRSCHDALRQLNLEMMRRPVNWVADLDLARFFDTLPHQEILSVLALRIKDRKFLQLIARMLKAGVQTPGGVVVDELGSPQGSIVSPVIANIFLDHVLDQWFSQVVRQHCRGYCSIIRYADDTMVLFEREDDAHRLMRVLPLRLAKFGLTLNQAKTQLLRFGKQAAWQAIKSGHKLPTLDFLGFTHYWGRSRTGKVRLKRKTSKKRLRRALVDLKQWLRQERNARKLPQLWQAIGSKMRGHFNYFGVTDNSRALYQFERAVHELLFKWLNRRSQRRSFTWDRFLRYMARYPLPQPGRLVSLLPVLSVE

SEQ ID NO: 2055 - protein, 498 aa, unidentified
  source 1..498: note = uncultivated organism;MG166-14 reverse transcriptase
MTYDHGKSDRLVVPQKPPNNAGRPAAEAVEGSERAKGNSPEGHDDRTQRRMQSSDGIERVRQAARKDRKRRFTALLHHVYDVARLRAAYLALKRDAAAGIDGETWRHYGEALGANLQDLAARVKRGAFRASPVRRAYIPKTDRRQRPLGVPTLEDKIVQRAVVEVLNAIYEQDVLGFAYGFRPKRSPHQALDARTVGIETKRVNWVLDADIQGFFDTLNHEWLVRFLEHRVADRRVVRLIQKWLRAGVLEEGVRTRSEVGTVQGGSISPLLANVYLHYVFDLWVQRWRQREAHGDVVVVRFADDFVVGFEHREEAARFLADLRERFARFGLTLHPDKTRLIEFGRYADRNRRDRGDGKPETFNFLGFTHACSKTRKGRFTVLRQTMRRRWQAKLREVKTELRQRLHDPIPEQGAYLRSVIMGHTRYYGVPRNGPSLTAFHAALARLWRVTLMRRSQTAFVSWERMRRLLARWLPVPHICHPYPNQRLAFATQGTSRMR

SEQ ID NO: 2056 - protein, 492 aa, unidentified
  source 1..492: note = uncultivated organism;MG166-15 reverse transcriptase
MTNGPGKSDRPVVPEKSSNNAGQPAAEGTEGRGLAKGNLPQQNASRTPSRSNAPSALERVRQAAGKDKKLRFTALLHHIYNLETLRMAYFSLKKEAAPGVDGETWRPYGEKLDENLQDLSERLKRGAYRAKPVRRVYIAKTDGRKRPLGVPVLEDKIVQRAAVEVMNAIYETDFLGFSYGFRPGRSQHQALDALYTGLLTRKVNWVLDLDIKGFFDGLSHEWLVKFVEHRIADRRVVRLIQKWLNAGVLEDGKRIRVEEGTPQGGSASPLLANVYLHYVFDLWVQAWRQKRAHGDVIVVRFADDIVVGFRDKQDADQFRAELTERMKKFNLELHPEKTRLLEFGPFAINNRRARGEGKPETFNFLGFTHICVKKRSNGRYTVLRQTIRKRLQAKLNEVKAELQRRMHEPIPEVGKWLQAVVRGHIRYYGVPMNQPALFLFRFQVGRLWYRALSRRSQNGRVLWDRMRRLITRWLPLPLVCHPYPLRRMGVLI

SEQ ID NO: 2057 - protein, 438 aa, unidentified
  source 1..438: note = uncultivated organism;MG166-16 reverse transcriptase
METKLARIAEIARANPKEQFTSLAHLINAEMIKACHKQMDKNKAVGIDGINKAEYEANLEENIKDLIARMKRQAYKPQSVKRVYIPKPGTDKKRPLGLPAYEDKLVQIALAKILNAIYEQDFLECSFGFRPHRSCHDALKVLNVIVNKSEINYIVDADIRGFFDHVDHEWMMKFIKHRIADPNIQRLISRFLKAGIMEAGISYATPEGVPQGGPGSPILANIYLHYVLDLWFEKRIRRQCKGASYMVRYADDTVFCFQYENEAKEFYQQLVMRLKEFNLEIADEKTKIINLGKNRDNDDDSDTGSFDFLGFTHYADKTDNGQTLIKRKTSKKKYKASLLKVKEWLKKNRHSPTKELMKMMKIKLYGYCRYYGVTNNRNAVSDFIDETKRLIFKWLNRRSQRKSFDWSRFNLFLKKYPLPRAYTCVNIFELGAGKSYVM

SEQ ID NO: 2058 - protein, 441 aa, unidentified
  source 1..441: note = uncultivated organism;MG166-17 reverse transcriptase
MGTDLKRIGERARKEPGLVFTSLYHHICDVDNLRTCYDKLEANKATGVDGVTKKEYGINHEENLQNLSQRLKQMGYKPKPKRRSYIPKEGSEKGRPLGISCFEDKIVEEATKRTLEPIYETIFKNSSYGYRPLQNQHKCLDALGQTIQQKKINYIVEADIRGFFDTVNHKWMIKFLKYRIGDERLTRLIIRMLKGGLMEDGLFYETREGTQQGSILSPLLANIYLHYVLDIWFAGRVRKQSSGKAYYFRYADDYVACFQYKDDAESFQEQMKNRLKGFGLEPAEEKTRCIEFGRFARVDAYKQGEKPEEFTFLGFTHYCGKTREGYFKVKRKTSRKKLGQSLHRFTDWARNMRNILKKGEMLKQARNKVLGHLDYYAITDNLERCKFYVRRAAQILFKWLNRKSQRRAYTWERFNKALAWIKWPEARLRKDLNPCRRAEAI

SEQ ID NO: 2059 - protein, 458 aa, unidentified
  source 1..458: note = uncultivated organism;MG166-18 reverse transcriptase
MKVHGAKDRNTVTFLEGKHVENTGGYKDMQTKRQDIRTLSKRHPKLETLMYRVDKESLLRQHRLQKKDKAPGIDMVTKEVYQENLNENIDDLIHRLKSFSYKPQPVRRVEIDKGNGKKRPLGIPVYEDRLFQGAMADILSDVYEPRFLDCSYGFRPKRSTHDAIKVINDTIMYKKVNYILDCDIKGFFDNVNHEWLMKFLRNDIADPNYLRYIARMLKSGVMIEGKYEDTSVGTPQGGLISPILANVYLHYVLDLWFEKCIKKQLCGEAYLVRFADDFLIMFQYERDAQRVYEAVIKRMELFGLELSKEKTRILPFGRYSDSRETFDFLGFTHFNSKTRKGYYSVGHKISRKKKKQFKSNLKKWVKENRNTQFDEFMKALNKKLTGSFNYYSLSGMIKEVRNLWQHSLYVTFKWLNRRSQRRSFKLERFYDIWNDRIIHPYIHVDIWSGDKVIYNKNV

SEQ ID NO: 2060 - protein, 432 aa, unidentified
  source 1..432: note = uncultivated organism;MG166-19 reverse transcriptase
MGTKLERIMEISATTPKPEFTSLYHLINIEMLKQCHKELDGSKAVGIDKVTKAEYEEHLEDNLTNLVSKLKNKAYKPLPSLRVFIPKANGKKRPLGIASYEDKIVQLAVKKILEAIYEPRFLNCMYGFRPNRGCHDAIKEVQYQINKRCINYVVDADIRGFFDHMSHEWMMEFLRLYIKDPNLLWLINKYLKAGVLTDGVFEESEEGSAQGNIISPILANIYMHNVLTLWYKFVITGRTTGHSFLAVYADDFIAGFQHKEDAKSYYALLKERLRKFNLELEESKSRMIEFGRYAESNSKRKYGRKPETFDFLGFTFYCGKGRKTGNFCVKLKTSRKKFSMKLKQTKEWLYQNNDLPVKELIAKLNKKLVGHYRYYGVSHNMNKLSSFLHYVQRYLFKVLNRRSHKKSYLWNGYIDMLKVYPLAQPKIYVRLF

SEQ ID NO: 2061 - protein, 501 aa, unidentified
  source 1..501: note = uncultivated organism;MG166-20 reverse transcriptase
MKTNNQNSNRQTSRKSDKVIVPMKQANKTGKSSAEFVEERTLIKRNIHTVSSGCTQRQRTTTSKLMNVREIAKKDKHAQFNSLYHLINIDLLIKSFDSLDRSSATGIDKISWLDYSKNIVENLKSLKEEISNGSYKPKPARIKCIPKADGSDRKISILCLRDKIVQQAVVLILENIYEEDFLGFSYGFRKGRCQHDALDALSVGIYRKKINWVLDLDISKFFDQVDHDWLIRFLQHRIQDKRIIRLITKWLKVGHLDEKGRHHRSGVGTPQGSVISPLLSNIYLHYVYDLWCNKWREKVCSGDMIVIRYADDSVAAFQNQGEANKFLVDLKVRLKKFGLKLHEDKTKLIRFGRYASRECKKHKLGKPKTFDFLGFTHICGFTQKGYFTIVRKSIKKRLLARLKVLRKEIFKRRHRPVRETARWLCSVIRGHINYFAIHGNLNSVYLYIFEISKSWYRSLCRRSQRKRLNWTKFQKYLEPLLPRVKIMHEYPSIRFDAKYSR

SEQ ID NO: 2062 - protein, 464 aa, unidentified
  source 1..464: note = uncultivated organism;MG166-21 reverse transcriptase
MSRKWGSETRATHGREGEAGHNVLTGRKMKDTQKSPLISTDLRQIAAQAKQDPAMIFTSLAHRMDIDFLTEAYHRVRKDGATGLSGVTSKEYKQNLIHNLTDLHQRLKNQTYVAPKIKRVWIDKGNGKKRPIGITEFEDKIAQKAVAMLLGAVYEQDFYDYSHGFREGHSAHQALHDIRSHCMGSNIKWVIDADISGFFDNIDRAKLIEIIKLRVNDGGLIRLIGKWLNAGVVDGEVLSYSDKGTPQGGVISPVLANIYLHHVLDEWFTNEVQPRMKGQCFITRFADDFIIGCQVETDARKIMEVIPKRFDRFGLSIHPEKTKLFSFAKPASDKEVRKGENTLDFLGFTHYWARSRTGSWVIKRKTSKNKLRKSIVAMREWCRNNRHKPLKWQYQMLCSKLRGHFQYFSVRCNMRSMESVRYFVIRGWQYWLSRRSHKSAIPWVQFRQLLEAFPLPTPKIVHNV

SEQ ID NO: 2063 - protein, 432 aa, unidentified
  source 1..432: note = uncultivated organism;MG166-22 reverse transcriptase
MGTKLERIADKSAREKRPIFTSLYHLLNEELLLQCHRELDGKKAVGVDGVTKAEYSTNLVVNIKALVIKLKNKSYKPRPVLRVYIPKGNGKQRPLGLAAYEDKIVQLGLKKILEAVYEPKFKGNMYGFRPHRNCHMAIKSMCTDLIRNRINYVVDADIKGFFNHMNHDWVMEFVKYYIHDPNILWLIKKYLKAGVMEAGEYKTDEEGSAQGNIISPMLANIYMHHVLILWFKAYYEKRGKGGCFLVVYADDYVAGFENKWEAEDYYRQMQDRLNKFGLEIETSKSRLLEFGRYAKERRKRRGEGKPETFDFLGFTFYCGANKQGKFCVIPRTSSKKFRAKVKALKDWLRTRLTKPLKLTMETLNRKLIGHYRYYGMTYNIQMLVKFHYHATNMLFCIMNRRSQKRSYNWEEFRRMLEYYPLAKPKRYVNLYE

SEQ ID NO: 2064 - protein, 438 aa, unidentified
  source 1..438: note = uncultivated organism;MG166-23 reverse transcriptase
METKLIRIAEIAKEKPKDVFTSLYHLLNTKLLTQCHNELAGNKARGIDGVTKLEYSTNLEENIQSLVERLKKHSYKPQAVRRVYIPKGDGKKKRPLGIPAYEDKIVQSGLNKILQAIYEPSFSKNSYGFRPERSCHQAIVKLNSIIEHKKINYIVDADIKGFFNNVDHEWIIKFIDLRIKDPNIIKLIKKFLKAGVMEEGIIQKTNVGMPQGSIISPILSNIYLHYVLDLWFEVKIRRQSTGEARIVRYADDYVCCFQYEKDAKLFYEKLKDRLAKFNLEIEESKTKIIMFGRFAEERCKINKQNIVPTFDFLGFTHYCSKSKNGKFRVKRRTSKKKFREKLKNFKVWIKAVRNLYKLQKIFEVAKLKLRGHYRYYGITDNSPMLKEFKYQIEGLLFKWLNRRSQRKSFDRYKFNLYLKLNPLPTPKIYVNIYNNAVF

SEQ ID NO: 2065 - protein, 451 aa, unidentified
  source 1..451: note = uncultivated organism;MG166-24 reverse transcriptase
MIRNYADKRELENMVNELLGIQYNIAKANRTDRKVQNLASYINEDTLRAIHKTMDKGKAYGTDKVTKEEYERNLDENLANLVKRMKGGSYRPNPTRRVYIPKETKGRMRPLGISCYEDKLVENAVAQILEQIYEPKFYDESFGFRPNRNCHQAVREIIEMVQYRKTNYVVEADIRGFFDNVDHEWLMKMLSHDIADRRFLEIIEKLLKAGIMEDGRYLDSERGTPQGNGASPILANIYLHYVLDNWFDVIVKRQCEGECYLIRYCDDFVCCFQNRYEAGVFRQRLEERFRKYGLELAEEKTKILEFGRFARQNRKARGEGKPDTFDFLGFTFYCGMDRKKQFYRCRVKTSKKKFRSKMKAMKEWIKAHRTMPLEMLFKTINAKLRGHYQYYGVTDNTREVKNFLMQTKWLLLKWLNRRSQGRSYTVDTFFNGLLRTFPLIEPKIKVSLFYR

SEQ ID NO: 2066 - protein, 427 aa, unidentified
  source 1..427: note = uncultivated organism;MG166-25 reverse transcriptase
MVQTSLEAIAKKAEQCRKHRFRNLYRELNEDYLKWCWRRLNKRAAPGVDKVSYQQYETNLDENIRELVEKLKAKRYRARLIRRCYIPKDNGKQRPLGIPAIEDKLLQYAVSQLLQAIWESDFLPSSYGYRPGKGAREAVDDLQNELYGSWYRYVVDADIKGFFDNIDHDWLIRMLQERIDDRAFITLIRKWLKAGVLDTDGKVLHPATGTPQGGSVSPVLANIYMHYVLNLWFNKVIVKQSRGKAHLCVYADDFAAAFEHRDDAERFYRSLGERLKKFGLSLSEEKTRIVKFNRFEKETSSSFDFLGFEFRWTTSKAGKNWLKRSTSKKKHLKSLRTIKEWIKHNRDLPLKNFFRILNSKLRGYYNYYGIEGNLDILRAFHFNVIALLFRWLNRRSQRKSYGWSGFCEMLTHFRIIEPRIRPVANAS

SEQ ID NO: 2067 - protein, 496 aa, unidentified
  source 1..496: note = uncultivated organism;MG166-26 reverse transcriptase
MNGTRKSDRPMVPTKRPNEVLVTEEDVEGRGLTKGNAIEQNADRTLYRNTPALSALDRVRQRARKDKKAKFTALLHHVTVELLREAYRRLQRHASAGVDGVTWVQYGERLEENLRELHARLHRGAYRAKPSRRVYIAKADGRQRPLGIATLEDKVVQRAVVEVMNTIYEQDFVGFSYGFRPGRGQHDALDALAAAIRTKNVNWVLDTDIRDFFTAMDHGWVVKFVEHRIGDRRLVRLVQKWLSAGVMENGRWAASRVGSPQGATISPLLANIYLHYALDLWAHQWRQQARGDVVIVRYADDLVVGFEHEDEAKRFWADLRERLRKFALELHPDKTRLIEFGRYAKARRTRRGERGSPETFRFLGFLHACGSSRRGSFLLTRRSDLKRMRVTLQAVKETMTRRRHDPVDEQGKWLGQVVRGYLGYFAVPTNSRSIGRFRSEVIRMWCRNLRQRSHRHRLTWQRMTRIADRWLPPARIQHPWPEDRFHAKTQGRSPVR

SEQ ID NO: 2068 - protein, 420 aa, unidentified
  source 1..420: note = uncultivated organism;MG166-27 reverse transcriptase
MALTSLHHVIDLEWMTEAWRLTRKDGAPGIDGMTRADYEANLQANLLDLLERIKSGRYRAPPVRRTYIPKADGTQRPLGIPTLEDKVAQRVIVMVLETIYEQDFLPCSYGFRPGRSAHQALQDLRDACMDGRLRWVLDVDIRKYFDTIAHEHLRAFLDRRVTDGVIRRMIDKWLKAGAMEEGLLHHTTKGSPQGGVVSPLLANIFLHHVLDEWYADEVRPRLRGRSTLVRFADDFVMAFEEVRDAERVLAVLGKRFERYGLMLYPDKTRFVDFRPRQPGGDNHPGTGGTTFDFLGFTHVWGRSRRGYDVVRQVTAKNRLARGLAAVSDWCRRHRHRAISQQHRHLTAMARGHYAYYGMSGNIRRVRCYGQELVRIWKTWLSRRDNEGSFRWSQMKALLQRLPLPRPSIIHRYAFLSETPA

SEQ ID NO: 2069 - protein, 423 aa, unidentified
  source 1..423: note = uncultivated organism;MG166-28 reverse transcriptase
MITGLERIAQNKLKYPESKHLNLIHYVNVENLKGAYKRINGKKATGTDKVSKDEYGKDLEANLNQLVARMKTFSYRPQPTKRVYIPKAGSNKLRPLVIPSFEDKLVQNIMADVLSEIYEPIFYDFSYGFRKDRDCHKAIEHLSEMIQRNKVNYIVDADIKGFFDNVDHKILMEFLRKEIGDDVFLRYIIRFLKAGIMEHGKKIENDKNIPQGGLISPVLGNVYIYYALDMWFEIVVKKYCQGFCGIVRYADDFVCCFEYKAEAQEFFVKLQERLAKFKLEIEVNKSKIIRFGRYAGEGKGTFDFLGFTFISGTDRKGRYRTIKLTSKKKMSAKMKAANEWIHANMHMPVNELIKKLNTKLIGHYRYYGITGNYDKLEMFRWYVIERLKAWLHRRSQRAKMTWEKFDKIIEYNPIVKPKVYHSI

SEQ ID NO: 2070 - protein, 431 aa, unidentified
  source 1..431: note = uncultivated organism;MG166-29 reverse transcriptase
METKLVRIAEISAKSKHPIFTSVYHLINEDMLKQCHKELDGNKAVGIDKVTKDEYGKNLDRNIKELVQRLKNKSFKPLPSLRVYISKGNGKKRPLGIASYEDKIVQMAVKKILGAIYEPRFLNCMYGFRPNRGCHEAIKEVYQRISYGKISYIVDADIKGFFDHIDHDWMMKFLEWNIQDRNLLWLIRKYLKAGIMEQGKFEPTEEGSAQGSVMSPMLANIYMHHVLTLWFKLVVQREMQGECFLVNFADDFVAGFQYKSEAERYYKELKERMEKFGLELESSKSRLIEFGRFAEQNRRARGECKPETFDFLGFTFYCSKTRKGGFVPKGQTSRKKFEQKVRAYKNWIYDNRNRPMREIIKELNVKLIGHYRYYGVTWNFRKITTFLHRVQQFLFKAMNRRGCRRAYTWNGFVEMLKYYPLAKPKTYYCLY

SEQ ID NO: 2071 - protein, 511 aa, unidentified
  source 1..511: note = uncultivated organism;MG166-30 reverse transcriptase
MPAANLASGVPGKAFGRNPAITADEKSDACVVPTSEPNDGGGSIPAPAEAREGRRAAKRNAVQPPAPRTQSRTSASMRLDGIREVAKGNKGTRFTALMHHITPDLLTDSFRHLKRAAAAGIDGVTWQDYENGLAERIVALWDAVQSGRYRALPSRRVYIPKPNGKQRPLGIAALEDKIVQQAVVTVLNAIYEADFLGFSYGFRPGRSQHRALDALWIGLHSSKVNWVLDADIQAFFDTIDHTWMLKFLEHRIADDRILRLIRKWLTAGVIEDGERTVFQVGTPQGAVISPLLANIYLHYVFDLWTHQWRRHEADGDVIVVRYADDSVVGFEQRQDIVTFLADLRTRMAKFGLKLNEEKTRVLEFGRYAVERRARRGQRRPETFDFLGFTHICATTRETRRFTVLRLTSAKRMRASLHAIRQSLMQRRHGPVSTTGAWLNRVVQGYLNYHAVPGNLKRLGMFRAEVCRAWLFALRRRSQRTRMTWDRFARLVARYIPKVRVSHPHPNQRFAS

SEQ ID NO: 2072 - protein, 498 aa, unidentified
  source 1..498: note = uncultivated organism;MG166-31 reverse transcriptase
MSQKSNMHVGRESDSRVVPTKCPNKSGEPPAEGMEGRRLTKENAERTAAPQTQSWINASNGLLGVREVARKEKRIRFTALLHHVTVPLLLDSFYALKRNAAPGVDGVTWKEYETNLGRRLEDLHSRIHRGTYRAQPSKRAYIPKADGRQRPLGIAALEDKVIQQGVVTVLNQIYEEDFKGFSYGFRPRRGPHHALDALWVGLMRKEVNWVLDADVRDFFGTVVHEHLVKFVEHRIADRRILRLIQKWLRAGVSEEGHWSETEVGTPQGAVISPLLANIYLHYVFDLWAQHWRKHRTTGDMIVVRYADDIVLGFQHRADAERFLQEWRDRMRQFGLELHPDKTRLIEFGRFAANKRKQRGEGKPETFNFLGFTHMCGKTRKTGRFIVKRKTIPKRLSAKLKELKEELRRRWHEPVDQLGRWLRSVVRGYFNYYAVPGNMDSLNSFRSQAIWQWHRALRRRSQKSRMTWKRFEPLVTCWIPSAKILHPHPNLRFDARHLR

SEQ ID NO: 2073 - protein, 439 aa, unidentified
  source 1..439: note = uncultivated organism;MG166-32 reverse transcriptase
MTDASTSLDMLTGLRKVAERAKREPAARFNSLAHLIDEELLTKAFRRLRRDAAVGVDGITKEQYGQDLERNLKGLHERLRTRRYRHQPIRRVHIPKEQGRKTRPIGISATEDKVVQSALREVLEAVYEQDFLDCSHGFRPRRNAHGAVRALTRAVNLSKANWILEFDIASFFDSVDRTQLMKMLQKRVADGSMLRLIGKCLHVGILDGEELSEPSEGTVQGSTLSPLLANVYLHHVLDLWFTEEVMPRLHGRAMFVRYADDGVFGFEREEDARRVLAVLGKRLERFGLTLHPEKTRLLDFSRPPRSRTEGRSPTTFDFLGFTWYWRRNKKGGWSVRCKTRRARLARAIRAIQVWCKEHRHVSVREQHAALTRRVQGHFNYFGVNGNTRSLRNFMHQVRRRWFKWLRRRSQRASLTWARFLDLLKAYPLPTPRIIVSIWT

SEQ ID NO: 2074 - protein, 493 aa, unidentified
  source 1..493: note = uncultivated organism;MG166-33 reverse transcriptase
MHDQEKSDSGIVAAKPTNKAGRPAAELVEPRPGTKGNADQQSTHRTQSRARVTQALNRVRQAARQRKKEQFTSLLHHINADTLRTAFYALKRKAAPGVDGVTWQDYEADLEPRLKDLHRRVHRGAYRPQPSRRTYIPKADGKLRPLAIAALEDKIVQSATVMVLNAIYEGDFCGFSYGFRPGRGPHDALDALSTAIKIRKVGWILDADIQNFFGAVSQEWLIRFVEHRIGDKRIIRLIQKWLKAGILEDGVVTVDDRGTGQGSVISPLLANIYLHYCFDLWADRWRRREARGDMIVVRYADDLAVGFEYEDDARRFLDAMRERLGEFALSLHPDKTRLIKFGRFAAADRKRRGLGKPETFAFLGFTFICGKCRRGFFQLQRKTRRDRMQAKLKDIKAGLRRRMHLPIPIQGLWLKQVVTGHFAYYAVPTNGRALSAFRHYVTDLWRRTLRRRSQKDGFTWNRIANLADAWLPRPRILHPWPDARFAVKHCGYR

SEQ ID NO: 2075 - protein, 448 aa, unidentified
  source 1..448: note = uncultivated organism;MG166-34 reverse transcriptase
MDETPSSPTISTKLERIAKLAKDAPGMAFQTLAHHIDIDWLHEAYRRTRKDGALGVDGQSAQEYATKLEGNLRSLLDRAKSGTYRAPPVRRVHIPKGSGSETRPLGIPTFEDKVLQRSVAMVLEPVYEQDFLECSYGFRPGRSAHQALNDLWDEAMKMGGGWVLEIDIRKYFDTLDHGHLREVLRRRVHDGVLLRLIGKWLNAGVLEDGGITYPSSGTPQGGVISPLLANIFLHEVLDIWFDREVRPRLSGRARLFRYADDAVLLFANEADARRVFDVLPKRLAKYGLSLHPEKTRLVQFRRPQRRSSKSDHDDRGPGSFDLLGFTHYWGLSRSGLWAVKRKTAKDRFRRALARVAQWCREHRHDDIRAKQQALAQKLRGHYGYFGIAGNSDGITRFCREVKGVWRTWLNRRSNRGPMTWTRMCRLLKRLTLPTPRVQPRILSRVANM

SEQ ID NO: 2076 - protein, 418 aa, unidentified
  source 1..418: note = uncultivated organism;MG166-35 reverse transcriptase
MVVIPEIQNQMAKYHKVQGLMRYINIKSMKEAHAQMDGEKASGVDDISKFKYEESLEANLNNLLNKMKKFEYYPKPVRRARIPKANGKVRELGIPSYEDKIVQKIIADILNNIYEPIFLDCSYGFRPKRNCHQALYKMCETIYSGKVNYIVEADIKGFFDNVNQEVLLRLLKMIIKDRHFIEYVKRFLKAGVMEQGIPKPSETGTPQGGNMSPVLANIYLHYVLDQWFENNFKKEAEGECYLIRYADDFIMLFEKPTDGETANIRIRQRLEIFGLELQEEKTRIFSFGLKEETKATFDFLGFNIYNYKDGRNIKLGMKIKEENIPKKYEAIKECVEQYRYLEMETLIKLVNLRLRGYYNYYGVSTNIEWLISIYQYAVKEVFMVWIERYGVPRDYNYLKYVYRMTPVLQPYKFITLYL

SEQ ID NO: 2077 - protein, 435 aa, unidentified
  source 1..435: note = uncultivated organism;MG166-36 reverse transcriptase
MKEVLTVEMQIATRARKYPGEALTNLHEFIDVGLLNGCFDSLNKKGASGVDAEKWIDYNKQRNERIPQLLTAFRSGTYRAPNIRRVFIPKGDGKLRPLGLPTVEDKLLQTAVSRVLTPVYEDIFYHHSYGFRPGKSQHQALEKLSGEVSLNRMRYIIDADMQNYFGSINHQYLREFLDGKIKDGVIRKMIDKWLKAGILENGQVIYPTEGTPQGGSISPLLSNIFLHYVLDEWFKEKIQRLLKGDSFIIRFADDFLLGFTSKEDALRVMEVLPKRLGKFGLTLHPEKTRLIDLGEVEGEDKHPKKTFDFLGFTHYMSKSRKGKSILKRKTSSKKLNLALKRLSDWIKFYRQKLPIAVLIGELNQKLRGHYAYYGITFNCRKLHTYYNRTKHLLHKWLNHRGGKRVWTWNKIAKLTTEWIPLVRPKIYHSYQLAKP

SEQ ID NO: 2078 - protein, 529 aa, unidentified
  source 1..529: note = uncultivated organism;MG166-37 reverse transcriptase
MLPEGLPRDPRELPIPSHTKRNASYLGGYVNPRVDRRGRGWMTEQSYNLIVPMKVGNRRAPARGGHGTRWREGGSKRTNLWKGDITRLRTRIIMYTTIDRIAELAKEDPKRQFFSIAHLITVEKLYEAFRSLRRDASAGIDGVTYAEYETNAEENIRQLHQRLKEGKYRAQPLRRVYIPKEDGKQRPISIPALEDKLVQKAVADLLNAIYEQDFLECSYGFRPGRGQRQALNEVGRVVCRRPTGWVLEIDIRSYFDSIVRSALVEMIEKRVNDGSVLRLIQKWIKVGVIEDGKLLVSETGTGQGQPISPLLANIYLHYILDEWFEEVVKPRLKGEAHEIRFADDAILCFQHKEDAEKVLSVLPKRFGKYGLTLHPEKTRLIEFGRDAARKAKEQGKKPETFNFLGFTHICARSRKGRFAVYVKTITKRLSRGLKAVADWCKQHRHDPVDEQQKTLNAKLRGHYQYYGRPTNYRSIWQFYRRVRCIWREWLGRRTRGHGMTWERFEKILRQHPLVPPRIMYSWAGTGSSA

SEQ ID NO: 2079 - protein, 440 aa, unidentified
  source 1..440: note = uncultivated organism;MG166-38 reverse transcriptase
METELEQIAAKARSDAKCRFTSLAHHVTRERVWKNLKQIPNNSVPGSDGQSVSATKETFDAWIEPVLQSMHRRGYKAPPSRRVYIPKHGKQEKRPLGVSCISDRALQKSTSQVLSAIYEQDFLPCSFGGRPGRGAHNAVATLHEIIAGRKVSWVLEADLKNFFGSLDHEWIQRFVEHRVGDPRIISLIRRWLKAGVMEEGAMHPSEEGTPQGGPISVLLSNLYLHYVLDLWFERAIKPLLKGEAYLVRYIDDFVVCFQYRSAAIRFQHVLLKRLEKFALALEPEKTKLVEFGRYAQKYAAKRGRKLPETLKFLEFTFYCTRNLKGNFKVGISTENTRVRRSMLRLCDLMRQMRHLPVQEQVINLNSVLRGHYAYFGMAGNFHALQRIHRSVERYWKRMLSSRSQKGGITLQAFHCLKLRFPLLRLKLFIPYWKLQGLAVL

SEQ ID NO: 2080 - protein, 433 aa, unidentified
  source 1..433: note = uncultivated organism;MG166-39 reverse transcriptase
MGTKLERIADISAHMPRPEFTSLYHLIDAEMLKQCHKELDGSKAVGIDEVTKEEYGRNLDANVKDLVERLKRKAYKPQPAMRVYIPKDNGKMRPLAIACYEDKIVQLALKKILEAIYEPRFLDNMYGFRPGRGCHDAIKVVYRKLNNDRICYVVDADIKGFFDHMNHEWLVKFLELYIKDPNIIWLVKKFLKAGVMDEGELLATDAGSAQGSIVSPILANIYMHNVLMLWYKVIIAKRCKGDNFLANYADDFIAGFQYKWEAEEYYQLLKARMNKFGLELEESKSHMVMMGRYIANARVKSGENTKFGTFDFLGFSFYCGQSKTGKPWIMPKTSGKIFRKKVKAMKEWLYRHRDTPLKLIMKTVNMKLAGHYRYYGVSFNSRWMANFWFQTRELLFKILNRRSNRRSYTRAEFVDMLKYYPLATPKIYVSLFQ

SEQ ID NO: 2081 - protein, 427 aa, unidentified
  source 1..427: note = uncultivated organism;MG166-40 reverse transcriptase
MEKEAAGIRFQTRDEEPRMENLMHHVNEQTLMEEHRKQSRRKATGIDGVTKDEYNVNVEKNLKELVERMKRFSYRPMPVRRTYIPKANGKQRPLGIPAYEDKLVQGVMARLLDEVYEVRFLDCSYGFQKGKNCHDIVRYINQTAMTKKVNYVLEADIKGFFDNVNHEWLMRFLNLDIADRRFLRYVRRFLIAGVMEDGAYLESDRGTPQGGLISPVLANVYLHYVLDTWFEYEIKPRLHGEAYYVRYADDFLIMFQYEKDARAVMSVLPKRLGRFSLEVAEDKTRILPFGRFKGTKEDFDFLGFTFFNTTTRTGKYRVGVRTSKKKLKAKKQAAKAWLRQQLTKPIARTMETLAAVVRGHCNYYGVSGNFKQIQKFWKYLKYETYRMLNRRDQKGKLRYPKFLRIWNFYVEEPKLKVDIWGWKPKTV

SEQ ID NO: 2082 - protein, 497 aa, unidentified
  source 1..497: note = uncultivated organism;MG166-41 reverse transcriptase
MDDREQSDGLVVPEKLPNNAQGGAAEAVEGSGSAKGNTASKSRPGPSAGQGASSALGRVRQVAVKDKEARFTALLHHVDVDRLRAAYFALRPKAAPGVDGVTWEDYGEELEDNLRDLHARVHKGAYRARPSRRVFIPKPDGRQRPLGVAALEDKILQRALVEVLNAIYETDFLGFSYGFRPGRSPHRALDALAAGIVGQKVNWVLDADFRDYFSSLDHQWLVKFLEHRIADRRVLRLIQKWLAAGVIENGAWTAFEEGVPQGASASPLLANIYLHYVFDLWAHQWRTRHAHGDVVITRFADDFVVGFEYREDAERFWADLRDRLAEFGLELNAEKTRLIEFGRFAARNRKARGLDKPETFQFLGFTHACAKTRKSGRFKLKRITDSKRVRAKLLAVKDEMARRMHLPIPQQGRWLARVLQGHYNYYAVPDNIEALSAFRKGIIRHWLKSLRRRSQRSTMTWERMWRLADQWLPQPRIMHPWPEQRFAATTQGRSPVR

SEQ ID NO: 2083 - protein, 428 aa, unidentified
  source 1..428: note = uncultivated organism;MG166-42 reverse transcriptase
MIMKTKFAIISRLSADNPEMVFNQLMHHFNKENLLSWYQSLKGKAAVGIDGVTKEKYGENLDENLDVLLEKLKTMSYVPGSVKQILIPKEGKKGATRPLGIGNFEDKIVQKGVQKILEAIYEPLFWDCSYGFRPKLGCHDAIKALRGHLYSHSVRKIIDLDLSNYFGTIDHELLMEQLSNKIQDKRFLRYIWRMFKAGTLSDGELILSDEGVPQGSVCSPILANIYAHHALDDWVNRTVKNHCKGNVEIFRYADDAVICCENANDAERIREVLPKRLSKFKLRLNDDKTKTIVFNKFEKGNSKSFDFLGFTFYLGLTKSGRVVPKLKSCGKKLRSKLTKVNEWCKGNRSIYPLRELWKSFCRKLRGHVQYYGISFNFKALQGFMFKSVKIFFKWINRRSQRKSMTFDKFALFLLRFPPPEAKIYHRLF

SEQ ID NO: 2084 - protein, 529 aa, unidentified
  source 1..529: note = uncultivated organism;MG166-43 reverse transcriptase
MYASRLHGNREIPETTGRVPRPVRSVQAGGRNTDMNATGKSDTGVVSLKRTNKGAQPIQYGQPPAESVERRPVAKGNSVQTTMTDTLRSEPVLSALDRVREAAKRDSTLRFTSLLHHVTVDLLRNAYFALKRNAAPGIDAVTWSEYGVGLEERLRDLHDRIQSGKYQAKPSKRAWIPKPDGRQRPLGIAALEDKIVQQALVLILQPIYEEDFLGFSYGSRPGRNQHQALDAIYVAITQKKVNWVLDADIRGFFDSVDHGWVIKFIGHRINDPRILRLLRKFLRAGISEDGEWAKTVVGTPQGAVISPLLANIYLHYVLDLWVQWWRKHHARGEVYIVRYVDDFVMGFQYRSDARRFQAALKDRLLKFGLELHDGKTRLIEFGRFAIEDRAERHVGKPETFDFLGFTHICAKKRDGKSFALRRKTIAKKLRAKVAQVSEILMRHRHKPLPQQGSWLKSVVQGHFNYYGVPGNRRALDSFRTLVNGAWIRALRRRSQKARSLTWVRLQALVKRWIPSARIVHPYPDQRFCV

SEQ ID NO: 2085 - protein, 506 aa, unidentified
  source 1..506: note = uncultivated organism;MG166-44 reverse transcriptase
MVIPLAGICPGGRPQGRSLPGLPAKAPNKTGQPVAEALEERSPAKGNTDSETRPGLSAGRGVSSGLDRVRQVARKDKEARFTALLHHVDVARLGAAYRAIRPQAAAGVDGVTWQDYGQDLERNLQDLHRRVHSGAYRASPSRRVYIPKAAGRQRPLGIAALEDKIVQRAVVEVLNAVYEEDFLGFSYGFRPGRKPHDALDALAAGILRKKVNWVLDADICDFFSRLDHVWIEKFLRHRIADERVLRIIRKWLNAGVIEDGNWSETPEGSPQGASASPLLANVYLHYVFDRWARQWRRQNAHGDVIIVRFADDLVVGFEHREDAQRFLADLRERFAKFGLELHAEKTRLIEFGRFAAGRRRARGLGKPETCDYLGFTHICGKTREGRFKLKRITISKRLRAKLAEVKGQLKRRRHQPIPEQGRWLARVVRGHLAYYAVPGNSRALRAFRDQATRHWFKALRRRSQRHRLDWEKMKRLAARWLPPVSILHPYPGVRFDARTRGRSPVR

SEQ ID NO: 2086 - protein, 518 aa, unidentified
  source 1..518: note = uncultivated organism;MG166-45 reverse transcriptase
MHENRETSGVSSKYGDRSGKAQRRTPDVYAPEESDRVVVPMKPLNNEAQASAEGVEGRTRTKENTGQSHTPPAQDGHGVSQGLAGVRKVARERKQERFTTLLHHLTVDLLRQSYYALKRNAAPGVDGVRWPEYEEGLEGRLIDLKDRIHRGAYRAQPSRRVYIPKGDGRERPLGIAALEDKIVQQAVVTILNEIYEVDFRGFSYGFRPGRGPHPALDALNVGIQRKRVNWILDADIRGFFDNMDHEWTMQFVQHRVADKRILRLIQKWLKAGVSEDGEWSETKVGTPQGAVVSPLLANVYLHYVFDLWLEVWREKVADGEVIAVRYADDLVVGFEHRAEAERFLRAFRERLAKFGLELHAEKTRLIEFGRFARSNRQARGEGEPESFTFLGFTHYCGINSAGKFTIRRQTARKRLEAKLQQVKQTLRARMHEPVPKVGEWLRRVLNGFYQYHAVPGNWASLKRFRLQIGRYWRHVLRRRSQRGRITLKRMARLYDRWLIQPRLVHPYPDVRFDAMHPR

SEQ ID NO: 2087 - protein, 443 aa, unidentified
  source 1..443: note = uncultivated organism;MG166-46 reverse transcriptase
MHRNEESVNTKLHCIAEKASKDKRCQFTSLFHLMNKALLLECFSQLKGSAASGIDKVTKEKYEINLDINLENLVKRLHEMSYKPQPVLRVFIPKPGSHKQRPLGIPTLEDKLVQAGLVKILQAIYEQDFIDDSYGFRPSRGCHDALRALSQTVEGESIHYIVEADIKGFFDNVDQEQLIAFISHRIADKRMLRYIKRFLKVGISEDGKYRASEKGTPQGGVISPLLANIYLHYTLDLWFEKRIKRASRGYARLIRYADDYTACFQYVSDAKYFMEEMKSRLNQFHLEVAPEKTKLFEFGVFAQSKAKSRGERAETFEFLGFTHYCSRTRDGKRFRMKRKTISRRFTAKLVGYKEWLRANRTLPTAQIMKTTAAKLRGHYAYYGVTDNSKSLHGFAHEVTQTLFKWLNRRGKRRCYTWEKFNKLLSLYPLPKPRIMVNLLSSLR

SEQ ID NO: 2088 - protein, 447 aa, unidentified
  source 1..447: note = uncultivated organism;MG166-47 reverse transcriptase
MPNTEPEYSGTLTKLALISERAQREPKCQFTSLAHLLNAQFLGHCYYQLGRDRASGMDGVTWQEYGEKLEENLKDLVTRLKAKRYKPQPAKRVYIPKDEHSTRPLGLPALEDKIVQKGIAWILEAIYEADFLDCSYGFRPGRSCHQAVDAVDKTIMRNPINHVIDADIKGFFDNVSHRWMLEFLEVRIADPSFLLLVRRFLKAGYVDSGFLVATEQGTPQGGNLSPILANIYLHYVLDLWFEKRIKRQARGACFLVRYADDFVCMIRYQDDARHIERALRERFTQFDLELHPEKTRVISFGRYERENAQCQDRRAHTFDFLGFTHFCGRSRKGTFIVGRRTSRKKFRKKCKELNLWLKRTRNSRPVKEWWPILAAKLRGHYQYYGVSGNMPSLQRYYHLALRLALKWLNRRSQRSSFNWAGFGAYLEHYPLPPPRIVHNLYTLSPVT

SEQ ID NO: 2089 - protein, 510 aa, unidentified
  source 1..510: note = uncultivated organism;MG166-48 reverse transcriptase
MKSTELGHVRVKSLDTACARVEWPNRERSGRPETAACRRGVLSGIVVGDGESPSQGEGPDGSTQPAKETRAGHVGSDPHEPTSLRAIAKRARACKHHRFRDLYREVNADLLCHCWHALNKDAASGVDGLTAAAYGEHLRANLADLAERVKAKRYRAKLVRRVYIPKENGQQRPLGIPALEDKLVQLACTKLLTAIYEGDFLDCSYGYRPGRSAREAVCDLTFYLQYGSYGYLVEADIRGFFDHMDHDWLLDMLSLRIDDRAFVQLIRRWLKAGILETDGQVLHPGTGTPQGGIISPVLANLYLHHVLDLWFERVVRPRCRGEAKLCRYADDFVCAFRYREDADRFFEALPKRLGKFGLEAAPEKTRIVRFSRFHPSMKRRVTFLGFELYWFRDRKGEPRVMRRTARKKLQGACRRIKEWIKCNRHLPGRELIRGLNRRLVGHYNYYGLRGNSRSLWRFYQWAMDCAFKWLNRRGGKRKSFTWPVFTRAFAKLGIAKPRITERSSARRVFA

SEQ ID NO: 2090 - protein, 520 aa, unidentified
  source 1..520: note = uncultivated organism;MG166-49 reverse transcriptase
MHENREISSAPSAISEGRSAKAISRTADMHVLEKSDCAVVPVNQPNKPAQAAAEVGEGRAQMKENIDQPRMLPTQSGTRMSQGLGGVRKAARERKQERFTSLLHHLTTSLLRDSFYALQRQASPGIDGVTWQEYESGIEDRLVDLHSRVQRGTYRAQPSRRVYIPKADGRQRPLGVAALEDKIVQHAVVTILNQIYEVDFKGFSYGFRPGRSPHQALDALAVGLERKKVNWVLDADILGFFDNLSHEWAVRFIEHRVADRRIIRLIQKWLKAGVSEDGQWSETKQGTPQGAVVSPLIANVYLHYVFDLWADVWRRKAAQGDVINVRYADDLVMGFQQRADAERFLEDFKERLAKFGLQLHPEKTRLIEFGRYAARDRKQRGVGKPETFNFLGFTHYCGQRHKTGTFAVKRMTAKKRMVAKLKAIKAELQRRMHHRSSEVGAWLRKVVNGYYQYHAVPGNLDQMRTFRQRVARLWRNVLVRRSQRARKKWELLTPIFDRWIPRPRILHPYPQTRFYAIHPS

SEQ ID NO: 2091 - protein, 455 aa, unidentified
  source 1..455: note = uncultivated organism;MG167-6 reverse transcriptase
MDPQDPTTDKRPKQTQDDTLEVRHGVILSPTLTLLRRKLSQKAKQEPRFRFYALYDRIYRRDTLETAWCLVLDNRGAAGIDGVTVEEIFATEENVTAFLDEIQEALRTKRYRPDPVRRVYIPKANGKLRPLGIPTIRDRVVQMATLLILEPIFEADFLDCSYGFRPGRSAHQALEAIQRNLGEGYREVYDADLQGYFDSIPHDKLMACVRMRVVDGTVLQLLRMWLETPVVEQAEDGSSKVSRPRQGTPQGGVISPLLANLYLHWFDKRFHAAGSPAQRGQARLVRYADDFVVMARHQSPQLIGQVEGLLEEWLGLKINRDKTRVVKLNDGGASLDFLGYTFAYQRGRFGGRQRYLHWGPSAKSVDRERAQLRDMISRRVCWKPLAELIADVNRQIRGWANYFGLGHPRRAFRKINSYVRCRLFAHLQRRSQRPYRLPEGVTWYRHFAHHGLVAL

SEQ ID NO: 2092 - protein, 443 aa, unidentified
  source 1..443: note = uncultivated organism;MG167-7 reverse transcriptase
MNLLTSRISVEKLQNSLQAKAKSEPGYRFYSLWDKICREDVLQEAYRRSRANAGAPGVDGVGFDAIETLGVEQWLGTLQEELRSKAYAPQPLLRVWIPKRNGGQRPLSIPTVKDRVVQTAVVLVLGAIFEVDLKPQQFGFRPNMDAKMAVRRAYFHITQHNRRDIVDADLSDYFTTIPHGPLMRCVTRRVADGTVLAVLKRWLVVPVCERTARSGFIRTTESRDRNRGTPQGGSASPLLANLYFRRFLLAWYDHGHYHRLDAHVVNYADDLVICCRPGNGAAALAQMRRLMDKLGLTVNDQKTRLACVPEESFDFLGYTIGRFYGKDGKAFIGTEPSRKSLKRIIGRIHDETTPRWNFDPVEKRVDELNALLRGWSGYFNQGRVIHVYRIIQRYTDARLRRWLMRRQGKRGTGYRQYPNQHLYEALGLYKLPESRAAVTKAKA

SEQ ID NO: 2093 - protein, 442 aa, unidentified
  source 1..442: note = uncultivated organism;MG167-8 reverse transcriptase
MNAAKANNAKEKARQLQRTLYLAAKEKPNRRFHALYDKISREDIMTYAWIRVKANKGSSGVDKITIQSIVEDYGEKRFIAETCGQLRNGTYRPSPVRRVDIPKGDGKTRPLGIPTVRDRLVQMATKIVLEGIFEADFKDFSYGFRPKRSAHDALRKIMTTVNEGKVYWVVDVDIRGYFDNISHEKLMALVEQRVNDRKTLKLIRGWLTAGVMKEGEFYVSDLGSPQGGVISPLLANIYLNYLDTIWERKYTQLGSMVRYADDLVILCHRKADALEAIQVLKAVFARLELSMNTEKSKLVNVWGNDQGFDFLGHHLRRSTVMRKGGKEARVLRCYPSKKAMQKMRTKVKETTASRTLLKQKTSEIIAALNPKITGWRNYYAKVDKGVANGFLAKIDWYIRKRLMIFCRKKFKRWRLRQSGFFNVIKEAGLQSATTWPSTYCAR

SEQ ID NO: 2094 - protein, 446 aa, unidentified
  source 1..446: note = uncultivated organism;MG167-9 reverse transcriptase
MITGESLTGSASVRKLQTVLHAKAKEEPGRRFHALVDKVWREDFLLAAWALVRRNGGAAGVDGVTVADVKAHGVERWIGELSRDLKDGTYKPSPVRQVLIPKKQPGKFRPLGIPCLRDRVAQTSAMLVLMPIFEADLEPEQYGYRPGRSAKDAVRRVHRLLHRGRNEVVDADLSNYFGEIPHAELMKSIARRVSDGRMLGLLKAWLEMPVVEEDGKGGTRRTNRARKERKGTPQGAPISPLLSNIYMRRFILSWKQQGYAQHFGAEIVNYADDFCVLGKAPAAVMLVAVNWLMERLKLPVNAQKTRCLRCPEEPIEFLGYRIGWNHRPTDGSRYIGTRPSKASVRSICRGISEQTERRYECRSAEEVVERLNRMLSGWANYFNLGQVSPAYRAIDTHATRRLRQWFRRKHKVRSRGYVRFSDGWLRETCGLTYLGTMRRDLPRAKA

SEQ ID NO: 2095 - protein, 468 aa, unidentified
  source 1..468: note = uncultivated organism;MG167-10 reverse transcriptase
MLDLWWSGQNMGEPRGATYSAVERSGKGRGDGPQGLPTPDKVRKLQVTLYRKAQTDRSYRFWSLYGEVLRADVLETAWKRVASNRGAPGVDGQTIDSIRMNPQKEQAWLGEIREELTTRTYRPQAVRRVMIPKANGGQRALGIPTVKDRVVQMAVYLVLMPIFEADFHPRSYGFRPKRHAHQAMEAIREALRMGKVEVVDADLASYFDTIPHDRLLKQVARRVSDGAILKLIKGWLRAPVIDESGANPKPPRRHKRGTPQGGVISPLLANIYLHPLDVAVNEKCRQKPRMVRYADDLLILCRPGEGEQMRQRLKRWLEARGLILNEDKTRVVNSQYHSVEFLGFVMRWQKSRKGSWYVHTEPSVKSRQQLRDRLRKMTPRITTWRKTEMVVGEVNAVIRGWGNYFAYGHYGEVFVKQRRFASHRLRQWLWRKHGNPSGKYRRWTDSVLAEQYGLYQLPTAILGTRANA

SEQ ID NO: 2096 - protein, 433 aa, unidentified
  source 1..433: note = uncultivated organism;MG167-11 reverse transcriptase
MAKNETNSVRQLQRNLYRKAKQDKEVKFYSLYDKMYREDVLWEAWRQVKANRGAAGVDGTTIEMIVSAEQEAAMIQTLQEQLRQKSYQFQPVRRVDIPKPQGGTRPLGIATVADRVVQTAMKLVLEPIFEADFQDCSYGYRPKRDAKMASQAIRNDLYNRAWGVVEIDFKSYFTTIPHEKLMVLVKERVVDGSMLRMIKQSLKVGVSYGGEVVPTTVGVPQGSPISPLYSNIYLNLLDRVWQTRGYPEQLGATLHRYADDVVLVCRKSATQALEAFESITTRMGLTINREKTRITKITEGFDFIGFQFVKRPSPNTGKPHIYIFPSKTSQRNIRRRIKTFTKRRAPIMPDEFVRQVNEVVLGWANYYRHTNASEAFRRLQRFINIRFRRYLNYRSKRRGFGWKEFPNAKLYAMGMIYIGSGFIRYERTTVNAL

SEQ ID NO: 2097 - protein, 429 aa, unidentified
  source 1..429: note = uncultivated organism;MG167-12 reverse transcriptase
MQTNNSKEKVRQLQNKLYLTAKKCASRRFHALYDKVYRDDVLFEAWKRVKANKGSSGVDGIGIEDIEAIGIEKYLTDIKAELADGRYKPSPVKRVMIPKPDGSKRPLGIPTVKDRIVQMAAKIAIEPVFEADFRDCSYGFRPKRSAKQALEKVRKACNNKGYYVVDADIEKFFDNVNQDKLMVLIEQRISDRRIQKLIRQWLKSGVLYGNILTISELGTSQGSVISPLLANIYLNTLDRLWEKYGLTHGILVRYADDIVIICKNKKSANHALNLLRYIMAKLELKLHPIKTKIVSMWDGKEGFDFLGMHHRRMTTETSKGQLYKETYQYPSRKAMKKMKAEIKRNVNSRRLLVAKEEDLIKNLNPKITGWRNYYFTKTNEKWMQALDWYIICTFTRWYNKKHQRRNHMSKVGFVRNSIYGKGLKKMARA

SEQ ID NO: 2098 - protein, 448 aa, unidentified
  source 1..448: note = uncultivated organism;MG167-13 reverse transcriptase
MERNRRLGNLQTPGSVQKLRTTLHAKAKEEPGYRFYLLYDKLYRQDVLDYAYRSCKANKGAAGVDGVRFADIEAYGEDLWVGELAERLRKKDYRPEAVKRVWIPKPNGKLRPLGIPTITDRVVQTALMIVLEPIFEADLQPEQYAYRADRGAQDAVQAVHRLLNTGYQHVIDADLSGYYDSIPHAELMKSVARRIVDRHVLHLIKQWLGAPVEEDDGHGHRKRTTINQDTGRGTPQGSPISPLLSNLYMRRFILGWKQLGYEGRWSAYIVNYADDFVICCKGQANKAMGAMRNIMDVLKLTVNEDKTHLCHVPYERFDFLGYTFGRCYNHETGRAYIGTRPSRKSIKRMVDSITKETDRCRTLLDADYVVARLNRKLSGWANYFCLGPVSSAYKAINAHVTQRLRRWLRKKHKVQGKGFTRYPDQYLHTQLGLINLPRRTRDLPWAKA

SEQ ID NO: 2099 - protein, 433 aa, unidentified
  source 1..433: note = uncultivated organism;MG167-14 reverse transcriptase
MIKAPIGLQDLRRRIYAKAKAEPSWRFWGLYVHVCKTETLQAAYKLAKENNGSPGIDGVTFESVESAGRAEFLEQLHEELTSGTYLPQRVRRVGIPKSGGKLRMLRIPTIRDRVVQGALKLILEPIFEADFQPGSFGYRPKRSAHDAVQRVRQGILRGKTRVIDLDLRSYFDNVRHHLLLEKIAVRVDDDAIMGLLKKILKSSGNRGVPQGGVISPLLSNIYLNEVDRMLQRAKEVTRHGEWSRVEYVRFADDLVVMVDSHPRYAWLFDALQKRLREEFDKLKVEVNEGKSRIVDLARGECFGFLGFNFWRVRSRKERWMPLVMPKLKKRTELLRKLKSIFKRSVSQPLRGVIDQINPILRGWVNYFAVGNSSRCLSFIRTWVEKNIRRLLAKARQRHGFGWKRWSSRWLYGELGLYNEYKVRRLPPMKASPS

SEQ ID NO: 2100 - protein, 462 aa, unidentified
  source 1..462: note = uncultivated organism;MG167-15 reverse transcriptase
MRPNTPTDKVRELQRRLYVAAKRSSTRRFHALYDRIHRSDVLREAWRRVRSNGGAAGVDGESIRAIEEGGVDAFLEGIQADLQAGRYRPLPVRRRYIPKADGKQRPLGIPTVRDRVVQMATKLVIEPVFEADFLPSSYGFRPKRSATQALEAIREAGNRGHNFVLDADIRAYFDSIDQEKLMGMVSERISDRRVLKLLRKWLEAGVMEEGTVRNPVAGTPQGGVISPLLANVYLHYLDRVWAQRCKHLGVLVRYADDFVVMCGTEAKVNEARRRVELVMARLGLTLHPEKTRIVDLRRGKEGFTFLGCVNRKRRSIQRAPHLHFMHRWPSPKAMERVRERVHGLTDARRSGAKDVKEIIASVNPVIRGWGNYFRTGTADREFNRIDWYVHERITRWLQRRGGQRARYWRSEWPFERLFAMGLHRLRKSVRYSAQAVPRRPSVSRVRATRTHGLKGGAGNRLA

SEQ ID NO: 2101 - protein, 409 aa, unidentified
  source 1..409: note = uncultivated organism;MG167-16 reverse transcriptase
MYGHEISPGYGAQHALKEKWNTGGPSAQSVSRQGGSYKPKAKSSAAQRKSEGIVVPRMGAKKNTSGGKGPCGGRDGGEGKREGMTGQTSRSNSPERQKPIANGGEARTGAGVRSRLRRVFARVPARPRGHGALEVLRKTAHNHVFDADIRDFFGTMDHQVLMKRIERRVSDRRVLRLVRQRLRAKVMDDGRAGGVIWPLLSNIDLNYLDSVWRRQCAHLGVLVRYADDFVVMCRTAKECEEAERRVKIIERLKLELHQDKTRRVDLSWGKEGFDFLGCHLRKRLSGPIWEKQRKRVYFLQRGPSQRSMKRVRQRVKELTPRARCHDDVREVIADLNPVLRGWGNYFRTGNASNQFIDIDRYVWRRLKDLRLKRAGRQLRAGVAERWNEDYFVGLGLHRLRGTVRYPEVT

SEQ ID NO: 2102 - protein, 434 aa, unidentified
  source 1..434: note = uncultivated organism;MG167-17 reverse transcriptase
MEGRGGLTMVSISLQDLRRRLYVKAKAEKTKRFWGLYVHVAKLETLRAAYEIAKKHNGAPGIDGVTFAAIEAGGVEGLLVQLRDELVARTYRPLRNRRVEIPKRGGKVRVLGIPAIRDRVVQGALKLIMEPIFEADFYDGSYGYRPQRTAHEAVARVAQAIVSGKTRVIDVDLAAYFDTVRQDLLLGKVAQRIQDGEILQLLRLMLKASGKRGVPQGGVISPLLANIYLSEVDAMLERAKEVTRDGEWARVEYARYADDLVILVDGYRRHAWLLQAVDRRLREELATLDLRLNEAKSRIVDLGQGEAFGFLGFDFRRVRSLRGRWRPQYTPKLTQRTALLEKLTERFRRYDSQPVGRVITEINPILRGWVNYFRIGNAARCLAYVRNWVEKKVRRHLMRARNRAGFGWKRWSTVGLYEALGLFHDYRVQYGART

SEQ ID NO: 2103 - protein, 443 aa, unidentified
  source 1..443: note = uncultivated organism;MG167-18 reverse transcriptase
MGNLATPESVQRLRTALHAKAKEEPEFRFYALYDKIFRTDVLAHAYACCRANKGAPGIDGRTFEGVEAYGAERWLGELARQLREETYRPEAVRRVYIPKPNGKLRPLGIPRLAERVCQTAAMLILEPIFEADMPQEQHAYRQNRNAQSAVREVHGLLVSGHKDVVDADLSGYFDTIPHVELMKSVVRRVVDRRVLHLVKMWLDTPVEEQDGRGRKKRTTVNRDTKQGIPQGSPISPLLSNLYMRRFILGWKKAGLEQRLGARIVNYADDLVICCKGDSAAKALNAMRQMMGRLKLTVNEEKTRICRVPDGEFDFLGYTFGRRYSAKTGRPYIATRPSRKSIKRMTEAVRIQTGRNMEWLDAGDMVKCLNQKLGGWANYFNLGPVTPAYRFLDRYTTNRLRRWFSKKHKQPGKGFTHYPDEYLYQELGLIRLPMLPQNLPWAKA

SEQ ID NO: 2104 - protein, 440 aa, unidentified
  source 1..440: note = uncultivated organism;MG167-19 reverse transcriptase
MSLETPLKIRSLQRKLYCKAKAEPAFRFYLLYDKICRDDILGHAYALARANAGAPGVDGQTFAEIAANGVEDWLAGLRQELVTKTYRPAPVRRVMIPKPGGGERPLGIPTIRDRVVQTAAKLVLEPIFEADMEASAYGYRPGRGGTDPVKEVHRLLLRGYTDVVDADLSKYFDTIPHSELLKSVARRVVDRHVLRLIKLWLKAPIEETDGEGKRRLRGGKSSTRGTPQGGVASPMLANLYMNRFLKHWRKTERGEAFRAHVVAYADDFVILSRGHAAEAMAWTKAVMTKLGLTLNEAKTSLKDARVESFDFLGYAFGPEYHRKGHYRYLSASPSRRSVQRLKDKVNGLLVPGNQDPWPEVRDRLNRLLRGWSGYFSYGTRLMAYRAIDNHVYDRVRHFLRRRSKVPGRGTRRFSDAEVFGTYGVLRLRRVHLGALPCAVR

SEQ ID NO: 2105 - protein, 430 aa, unidentified
  source 1..430: note = uncultivated organism;MG167-20 reverse transcriptase
MNAKWLTTPKEKVQQLQEKLGHAAKENKKRKFHALYDKIYAWDTLKEAWNRVQANKGAAGVDGETFANIEKIGVEEFLHDCQKQLEQGKYHPEPVRWQYIPKKDGKQRPLGIPTIRDRVMQMATKLMIEPIFEADFQESSFGFRPKCSAKQALDRIRKACNRKGNWVIDVDIQGYFDNINQEKLMKLVELRINDRRVLKLIRKWLQAGVMEEGKVRRSDLGTPQGGVISPLLANIYLNYFDVLWERHGTAVGELTRYADDFVVVCKTKKDAEHAFKLIRTIMERLELTLHPTKTRIVGLWTGEEGFDFLGMHHRKTKAETSKGKVYYTTQQWLTKKAEERIREVVKERLAPPSMRSYSFAEHMAWLNPKIQGWRNYYYTPYSQLKLAKLDWYILQRLTRWCAKKRQRRRWMSSIHEVKFIAKQCGLKTLL

SEQ ID NO: 2106 - protein, 440 aa, unidentified
  source 1..440: note = uncultivated organism;MG167-21 reverse transcriptase
MLKTPDNIRELQRKLYRKAKQEKEYRFYLLYDKIYRLDILNHAYRLVKANKGAPGIDGEAFDSIEEKEGGVEKYLEEIAGTLKRKDYKPQAVRRVNIPKPAGGKRPLGIPVIKDRVVQMAVKIVIEPIFEADFQENSYGFRPKRSAHQAVEDVRNHLLKGKTDVIDADISKYFDTIPHDKLMQLVAKRIVDKQILKLIKMWLKAPIVEEREDGKKEYKGNDKGTPQGGVISPLLANIYLNVLDTLWAVKKVQERLGARLVRYADDSVVLCRGNTDRILTGIKRVLDDLGLTLNEEKTRIVDARQESFDFLGFSIGMKRGLRTGKIYPHTEPSKKALKHIRSEIKQLTTERYSATPTAVVIRRVNEVARGWVGYFRYGNCTKTMSALKGYLVYRMRIYLRRKHHYRSFGYKAYPDRYYYDSLGLYEVPTKAPWSQNVKASG

SEQ ID NO: 2107 - protein, 427 aa, unidentified
  source 1..427: note = uncultivated organism;MG167-22 reverse transcriptase
MDNNLPTTDKVQEFQRKLYLKAKSQPNFRFYALYDKIYRTDVLQKAWQRVRLNHGSPGIDGKTIKDIEEAGVEDFLKGIQQELKAKEYQPSPARRVYIPKPDGRLRPLSIPTLKDRVVQMALKLVIEPIFEAHFEDNSYGYRPQRNAQQVALEIRKYLNYGMTEVIEADLEDCFGSIPHRELLDMIARRVVDGRVLHLIKLFLKTGVMEQGGKRIDETGTPRGGVISPLLANIYLDQMDKGWKPLNETARLLRYADDLVIITKYNAEKFLFELQKLTTKLKLKLKPAKTRVVNAEEESFDFLGYSFRKALNPQKTKKVAYFWPSQKAEKTIKEKVRKITNPARPVKVGQVIKELNPVIRGWVNYFRIGNSTKKFDNLKLCVAEKIRKFMRRRRQKAGYGYKKYPDEYLYSKLGLYRDYHLAWTKALR

SEQ ID NO: 2108 - protein, 466 aa, unidentified
  source 1..466: note = uncultivated organism;MG167-23 reverse transcriptase
MSAVLASPADSGAVVVDKVRLDKVRALQHTLYRTGKADPGRRFHALWDKVLRRDVLWRGWVAVHANNGAPGVDRTTLDWIEKRSTASTGSWMNCPANCGRGPIGPLPARRVYIPKPGTTEQRPLSIPAVRDRVVQAALKIVLEPTFEADFAPCSFGFRPKRGQHDALQVLVDESWRGRRRVVETDVADCFSAIPHDRLIQAVEERVCDQSVLKLLRAMLRAGVMESGVVHHPDTGTPQGGVISPLMCNVYLHRIDRAWDTRTYGVLVRFADDLLLVCKSEQQAQAALVRLRELLADLGLAPKEAKTRIVELALGREGFDFLGFHHRMVQSRGIHGRGGIEFLDRWPSDRAMRRAHDRITELTVRSRLWLLVEEVVKDLNRFLRGWAGYFRYGHSAARFHTIAQHARDRLALFIGKRHKRGRGFGRSVVAYKSKDSCGLLNLNGTVIAPRANKPWREKPNAGGERRR

SEQ ID NO: 2109 - protein, 452 aa, unidentified
  source 1..452: note = uncultivated organism;MG167-24 reverse transcriptase
MNQNNVGVEVQGELFKRRGHEIPDAERVQTLQDKLYHKAKHERNYKFYVLYDKMFIPYMLRQAWKSVKSNGGSPGVDRQTIADVEKYGVETYLQELGEEVRKQTYQPQAVKRVMIPKANGGERPLGIPTVRDRIVQTVCKMIIEPIFEADFEESSYGFRPNRSSKDAITAIKGNLKRGKTAVYDADLSKYFDTIPHDKLLIALKERISDPRMLKLINKWLKAPVSDHGQYKGGKKNHVGTPQGGVISPLLANIYLHLLDRIVNNPNSLFGKYGIEIIRYADDFVLMGKAIPPEVTEKLQGILTRMGLSLNETKTRQINARESSFDFLGFTIRHDVDLFGRTFKYWNIVPSRKSEQKVRDKIRDFMSIHGHSTTEDLTHGLNSILRGWLNYFEIPGVSFPINSKYRLRFYLSVKLYRYYARKSQRKCKLFGQKVFDVLTTKYKLIDPIKYALS

SEQ ID NO: 2110 - protein, 444 aa, unidentified
  source 1..444: note = uncultivated organism;MG167-25 reverse transcriptase
MHAIKGQPHPFDSSRQLQRKLYLAAKKSRNRRFHALYDRIYRPDILWRAWVEVEANGGGAGIDGKTLQVIETEGVANFLEVLHRELKEGKYRPLPVKRVYIPKADGSQRPLGIPTVRDRVVQQACRIVIEPVFEASFHDCSYGFRPKRSAVQAVQKVKDDLVFGWQVVDADIRGFFDNLNHELLMSLVARRISDRRVLKLIRSWLKSGIMVAGEWEAVDGGTPQGGVISPLLANIYLHVLDMYWMRDFSHLGKLVRYCDDFVIVCYHRWQAEEAMKAVQGIMKRLQLELHPEKSRLVNLNETGFDFLGFHFHKVQSRVSGKYAPLTWPSRKAMKAIRTKIHDLTSVRWLRIPLQEILNNLAPVIRGWCGYFRRGNATNQLQALDRYVRRRLYKNFWRRSKRRSNKVKDAFCRWWESVKVEPFYLKGYCGGTLRKPSGESGRKAV

SEQ ID NO: 2111 - protein, 444 aa, unidentified
  source 1..444: note = uncultivated organism;MG167-26 reverse transcriptase
MIAKAQNMPLDKVRVLQRSLYRAAKANPTRKFGVLYDKVCRADVLRAAYRQVKANGGAPGIDQQTFEIIEKEIGVDVFLRDIKERLLRKRYKPLPVRRVYIPKADGTQRPLGIPVIADRVVQAAVKIVIEPLFEANFKDFSYGFRPQKDAHKALREVYKWLNFGCHWVVDADLKSYFDTIPHDRLLLSVRSKVIDRSVVKLIEMWLKAGVMEEMQVRKETTGTPQGGVISPLLANLYLHWLDNYWVRKGYGERKHDAHIVRYCDDFVILCSRRPDVYLAETKKVLDRLGLTLNAEKTRVVNVKEETFDFLGHRFTVRPSKRTGETKTYYYPRPKAMKAVKSKIREVVRNGQHWDLPELIRERINPILRGWGNYFKIGNSRKHFLSIANYTTYILSIMLRKKHKKRSKGWRDHPPSWFYTNHGLFKLYSLKNGVVAPVRTRVVTP

SEQ ID NO: 2112 - protein, 437 aa, unidentified
  source 1..437: note = uncultivated organism;MG167-27 reverse transcriptase
MVLSATGGDVRELQRKLWASAKRSPERRFHALFDRIYRSDVLWEAWRRVRKNRGAAGVDSQTLAMVEEYGVERLLGELQCALREGSYRPAPVRRVAIGKPDGGVRPLGIPTVCDRVVQQATRMVLEPIFEADFLEVSYGFRPKRSALDALERIRVAFPRGAVWVAEADIRDYFSSIDQQKLLALVAERVSDRRVLKLLRLWLQAGVMDDGVLRETVTGTPQGGVISPLLSNIFLHAFDRAFVARGIGTLVRYADDWVVLCSSEREARAALAAAGEILDGLGLELHPEKTRVVDLREGREGLDFLGCHFRARVSGRLLERGIRRYYLHRWPSQRAMKSIRGKIKAKTGRNRTGVKDIRVVIDDLNPILRGWGNYFRTGNAADKFTEIDRYAEWRLKRLMVKRKGRNLKAGQAERWTHTWFHGLGLHQLMGTIRYPGTA

SEQ ID NO: 2113 - protein, 434 aa, unidentified
  source 1..434: note = uncultivated organism;MG167-28 reverse transcriptase
MTKAPISLQDLRRSLYVKAKADPTWRFWGLYVHVCKRETLYEAYRMAKENGGAPGIDGVTFEAIEESGVEDFLRQIRDELITNTYRPMRARKKEIPKDGGKVRVLSIPAIRDRVVQGALKLILEPIFEADFQPGSYGYRPKRTAHQAVNRVAQAIVEEKTRIIDIDLRAYFDNVQHYLLLEKVARRVQDDAVMHLLKMMLKATGEKGVPQGGVISPLLSNLYLTEVDRMLEKAIATTRRGQYTHVQYARFADDLVILIDSHPRHDWLVRAVERRLREEMGKLRVEINEEKSRRVDLSKGEKFSFLGFEFRRILSRNQKWRAHFAPKLKKRTALFAKLREIFRRYSSQPVGRVIELINPTLRGWVNYFAVGHSSRCFSMVKDWVEKKVRRHLMRARKRRGFGWKRWSSEWLYGTLGLFSEYRVLRSAPPAKALPG

SEQ ID NO: 2114 - protein, 435 aa, unidentified
  source 1..435: note = uncultivated organism;MG167-29 reverse transcriptase
MTKTPVNLQDLRRRIYRKAKAEPTHRFWGLFVHVTKAETLEQAYCNAKQNGGAPGVDGQSFKDIEAQGRTAFLAALRDDLVANRYEPKPNRRKDIPKGNGKVRTLQIPCIRDRVVQGAVKLILEPIFEADFCTNSYGFRPRRSPHRALAEVRRSVLRLMSTVIDVDLSRYFDTIRHSVLLDKIAKRVQDPEVLHLVKQILKVGGKVGVPQGGPFSPLAANIYLNELDWTFDAIRRKTAEEPYEEVNYHRFADDIVITINGHHSKRGWAERAQQRLQEQLVPLGVELNKEKTKVVDLLKGEAFGFLGFDLRRTRKRKGNGHYLQMTPKKKARKAIKAKIRDIIRHGGATPLPKMIEQINASLAGWVAYFRVGNSSRAFSEVRDYTEMKVRNLLTRRKRRKKTSIGWRRWTNEYLHGVLGLYWDWKVQPLPGAKRLT

SEQ ID NO: 2115 - protein, 427 aa, unidentified
  source 1..427: note = uncultivated organism;MG167-30 reverse transcriptase
MIKAPISLQDLRRKIYLKAKADKAWRFWGLYVHVCKRETLQEAYKMAKRNNGALGIDGVTFDAIEAAGLEAFLEGIHRELVSGTYRPMRNRRKSIPKDKNKVRILGIPTIRDRVVQGALKLILEPIFEADFQAGSYGYRPKRTAQAAVNLVAEAVVRNKTQVIDVDLKAYFDHVRHDLLLKKVAERVNDARVMSLLHLILKAGGKRGVPQGGVISPLLSNIYLNEVDKMLERAKEVTRRGKYEYLDYARYADDLVILVDGLQRWDWLVKAAYGRLLEELGKLDVQVNPEKSRIVDLTQGETFSFLGFDFMRSKTRRGKWGVRVTPKMKARTSLLRKLKEVFRRHTSQAVDRVIYLINPILRGWVNYFRIGSSSRCFGYIKVWVEKKIRRHLMRARQRSGFGWDRWSRAWLYKTLGLFKDYRVQWYRA

SEQ ID NO: 2116 - protein, 457 aa, unidentified
  source 1..457: note = uncultivated organism;MG167-31 reverse transcriptase
MGASRLTAKSYTEEEIREIAERQNLVGYPHLALMREKLSVKAKNEPKFRFYNLKRLVVETETLRCAWAQVRANRGAPGVDGVTIEDIERSEGGAEAFIEGIQKELHEKTYRASPVRRKYIEKANGKLRPLGIPTVKDRVVQCAVKLIIEPIFEADFHDCSFGFRPNRSAQQAVDRIAAEIKSGKRQVYDADLSSYFDTIPHDKLFLALRTRITDSGVLSLIRQWLKSNSVEPNGVQKSPKGKGTPQGGVISPLLSNIYLHWFETCAMLVAKATNQVMSIVRYADDFVILAGKWADGFVQRIEGELENRFELVVNREKTKLLDMEADKSALSFLGYEFRYVRDRHYCKGDRYLEWCPSNKSVKKVCRKVKEETMRRKLLLPVEGVIKRLNLVLDGWGRYFKCGYPSRQFAKVNTYARYRLYKFLNRKSQRRYRLKYAETYYGELQKLGLIALTRRRYR

SEQ ID NO: 2117 - protein, 444 aa, unidentified
  source 1..444: note = uncultivated organism;MG167-32 reverse transcriptase
MRTYIATPESVQKLQAALHDKAKKSPNFRFYALYDKVYRKDVLAFAYACSKANGGAAGVDGQTFEDIEAYGVERWLDELTQELKSQTYRPLPVRRVYIPKPDGKTQRPLGVPAIRDRVPMMAAVLVLDPIFEADLQPEQYAYRRDRSALDAVRHVHKLINTGHVEIVDADLASYFDSLPHAELLKSVARRVVDGAMLHLIKRWLTAPVEETDERGKKHRTTRNRDEGRGSPQGSPISPLLSNLYMRRFVLGWKKLGHERRLGAFIVNYADDLVICCRGRGEEALAAMQVMMTKLKLTVNETKTRVAKLPEEKFDFLGYTFGRCYSPKTGRAYLGTIPSRKRVKRICEAISNETRRSTTPLDHKIVVTKLNQMMNGWANYFCLGPVSKAYRAVEKHARRRLRQWLRAKHKPSKTSTGKFSIAYLHDRCGLIRLTQRTSGFSWAKP

SEQ ID NO: 2118 - protein, 444 aa, unidentified
  source 1..444: note = uncultivated organism;MG167-33 reverse transcriptase
MLTTPEGIRTLQRKLYRKAKQESAYRFYALYGKVCRADILSHAYGLVCANKGSAGIDGVTFEAIETTEGITAFVAELAEALKSKTYRPDPVKRVMIPKADGTKRPLGIPTIRDRVAQMAVKLVIEPIFEADFCDTSYGFRPKRSAHGAVDDVAHTLNKGYCEVIDADLSKYFDTIPHADLMAVVAERISDGEILRLIKMWLKASIMEEDKDGKKRNIGGGKGNRKGTPQGGVISPLLANLYLHQLDRIWEKRQLQKRLGARIVRYADDIVILCRYGAERPMTILRQILEQMKLTLNEAKTKTVDAYKGKFGFLGFTIWMGKGRKTGNYYPHVQPSKKSLQTIKDRITKLTTRERTIMPLEWVVNEVNATVRGWVGYFHYRNCSQTLAHIRYHLEQRLITHLRKRYKVRDRNTGYVRFPQRALYDRYGLYKVPTTAAWAKAHAPR

SEQ ID NO: 2119 - protein, 441 aa, unidentified
  source 1..441: note = uncultivated organism;MG167-34 reverse transcriptase
MSLQAPEKVQKLQQTLHAKAKESPDFRFYALYDKLCREDILAHAYQVARHNGGKPGVDGEDFADIESYGVERWLGERAQALREKRYRASPVRRVYIPKPNGKQRPLGIPTIRDRVIQTAAVLVLAPIFEADLQPEQYAYREGRNAHDAVRHVHKLLNTGHTDVIDADLSGYFDTIPHAELMQSVARRISDRHMLALIKQWLVAPVEEDDRRGGRRRTTRAKDSKCGIPQGAPISPLLSNLYMRRFLLGWKTLGLEARFQARIVNFADDFVVCCRGTGEDAMEAMRKMMDKLKLTVNETKTGRCRIPQERFDFLGYTFGRCYSTQTGRAYLGTRPSKKSVQRVCRRISEMTSRRRLLIDPEDEVRALNRVLIGWANYFSLGPVSKAYRAVDRHATQRLRRWLCEKHKQPGKGTARYPNEHLHDVLGLQRLSVRTRDFPWAKA

SEQ ID NO: 2120 - protein, 431 aa, unidentified
  source 1..431: note = uncultivated organism;MG167-35 reverse transcriptase
MNAKANNTIDKVRELQRKLYLSAKANKKRRFHALYDKIYREDILTKAWKQVKSNKGAGGVDEVSIDDINSYGEDKFLKEIKEELLGNRYNPKPVKRVYIPKKDGSKRPLGIPTIKDRVIQMAAKIVMEPIFEADFKEYSYGFRVKRNAHDALEDIRKECNKGGWWVLDGDIRNYFGNINHDKLMILLKQRISDRRILKLIGKWLKCGVFENGEYTASKVGSPQGGCISPLLSNIYLNYFDTVWEKYYSHTGRLVKYADDFVIISKTKKDVQHAYKAVEEIFKRLKLQLHPEKTKIISLWGGKEGFDFLGFHHRFIIRKSKANFKYHDIMQIPTGKAMKGMRAKIREVFGSRATLQNDIRDMVKKMNRKLNGFKNYYAINYLARQQLKKIDWYVTLRFTIWYRNKKQLKQRCRYTGELTTELKNCRIVKLSY

SEQ ID NO: 2121 - protein, 603 aa, unidentified
  source 1..603: note = uncultivated organism;MG169-12 reverse transcriptase
MRNPRIILNTLHNHSKISDYKYERLYRILFNEEMYYVAYQRIYAKPGNMTAGTDNKTIDNMSLKRINALIESLKNETYQPKPARRTYIPKKNGKLRPLGIPTFEDKLVQEVARMILESIYEDYFESTTHGFRPFKSCHTALTQIRNTFTGAKWFIEGDIKGFFDNIDHNVLVDILKERIADERFIRLIRKFLKAGYVEQWHYHHTYSGTPQGGIISPILANIYLDKFDKYMNEYADKFNKGKEKRLNPQYLKVIRQMNNLRKKIKRCKEEIKIEQYETEYRKLKREALNMPCRMDMDETYRRVKYVRYADDFLIGIIGSKADCEMMKTDITRFMEKNLKLELSQEKTLITHAQKAAKFLGYEISIRKSIAYKRNKNNVLMKSFNGNVILTLPIGIVKEKLLDYNAMSIKSPKGKEIWQAKYRGFLNKRDIAEIVSQYNSEIRGFYNYYSIANNISKAGSKFGHIMEYSMYHTIAQKTNSSISEVIRKYTKDGDFTVPYTDSKGNVRFRVFYNEGFKRKEANKYADCDNMPKVFHVPRPSLVERLKTCTCELCGHKGEVVMHHVRTLKTLKGVKEWDKMMLQKHRKTLVVCKKCYATINNCKEI

SEQ ID NO: 2122 - protein, 611 aa, unidentified
  source 1..611: note = uncultivated organism;MG169-13 reverse transcriptase
MENVRDIMRNPKLVLNSLSEHSRNTDYKFERLYKNLLNAEMYYVAYQKIYAKPGNMTQGVDGQTIDDMSIMRIKQLVDSLKSETYRPSPSKRTYIPKKNGKKRPLGIPSFDDKLVQEVIRMILEAIYEGSFEQTSHGFRNNRSCHTALVSLQKSFIGTKWFIEGDIKGFFDNINHDVLINILRERIRDERFINLIRKFLNAGYVEDWKFHKTYSGTPQGGVVSPILANIYLDKFDKYVKEYIQKFNKGEKRGRTVEYRKLECRKRYLSKKLKNVESEELSNAIISEIKEIDRKRTLIPSNDKMDDGFKRLKYVRYADDFILGLIGSKKDSMQIKNDIKGYLNDVLKLELSEEKTLITHTEKPAKFLGYEIYIRKTNQTKGNSLGRKVRTFNSKVVLSITPEIIRKKLIEYDAIRFKTIDGKEIWRPKARPYLLNHDDLEILEQYNAEIRGFYNYYSIANNSNLVSNLGYIMEYSMYKTFASKYNTTISKIINKYRRAKEFSIAYTDKYGNTKYRDFYNQGFKRKQPYCMSPNDLIPNTHIISNCRTSLIDRLKACKCEICGAEENLHMHHIRKLKDLKGKKRWEILMIARKRKTIAVCINCHYKIHAGKLD

SEQ ID NO: 2123 - protein, 603 aa, unidentified
  source 1..603: note = uncultivated organism;MG169-14 reverse transcriptase
MRNPQIILDALCSHSKVSDYKFERLYRILFNEEMYHAAYERLKVKQGNMTPGTDGDTMDGMSLMKITRLIDSLKDETYSPKPARRTYIPKKNGKLRPLGIPSWNDKLVQEVVRMILQAIYEGAFSDRSHGFRPYRSCHTALTQIQKTFTGVKWFVEGDIKGFFDNIDHDILIGILRERISDERFLRLIRKFLNAGYVEDWKFHESYHGTPQGGIISPILANIYLDHFDRHMARYAETFNRGEGRKRNPEYFNLNTKTCALRRKLRKETDENKRAELRERISLMQAKLRTLPCKLDIDDDYRRIVYTRYADDFLIGVIGSKEDCERIKADITIYMRDCLHLELSPEKTLITHAQETAKFLGYDITVRTSERMSRTRNGILQRNHKGKVHLLLNSETVRKALEKYDAVQYTSENGKIVWKPKSRPKLLAMKPHKILERFNSEIRGFYNYYCIANNCSGQCSSFAYIMEYSLCKTLAQKLNTTKIKIKSKYTNNGRFSISYRTKDGSIKESVLYNQGFARKAKGYDVQPSVECPNEFLPATTLAHRLKSGVCELCGKDNEVLYMHHVRMMSCLDKNTPWGRQMLKRRRKTLAVCKTCMDIINQSKQ

SEQ ID NO: 2124 - protein, 600 aa, unidentified
  source 1..600: note = uncultivated organism;MG169-15 reverse transcriptase
MRNSENVLNILSEHSNVSGYKFERLYRILFNEQMFYAAYQRIYAKQGNMTSGMDGKTIDQMSVLRIDNLIVSLRDESYKPHPARRVYIPKKNGNKRPLGIPSFEDKLVQEVVRMILGAIYEGYFEYSSHGFRPNKSCHTALTHIQKTFSGTKWFIEGDIKGFFDNINHEVLINALRERIADERFIRLIRKFLNAGYVEDWKFHKTYSGTPQGGLISPILANIYLDKFDKYMKEYAKSFDKGRERQSSTEYKRLENKRSRLVIKAKSVEDESVRANLIDEIRKVESEIVNTPYGLNMDETFKRLKYVRYADDFLIGVIGSKAECVEIKANITRFMSEELNLELSDEKTLITHAQHAAKFLGYEVSIRKSQALRHNRNGVLRRPFNGRIVLRVANEVVKKKLLDYDAISVGQVNGKEVWKPKSRSYMIGMKPEDIMAQYNAEIRGFYNYYSIANNISYLGNSFGFNMEYSMFKTIAQKQNSTLAQTIKKLRKGKNFIVSYVDGKGQKRTRVFYNEGFKRKTAKGHTQYDNLPNTNISPYPSLIERLKTEVCELCGAEGKTVMHHVRTLKDLKGNNEWEQQMFKRHRKTLAVCETCNAKIHVR

SEQ ID NO: 2125 - protein, 603 aa, unidentified
  source 1..603: note = uncultivated organism;MG169-16 reverse transcriptase
MRNSTNVLNSLYKHCKDLDYKYERLYRILYNKDMYAVAYQRIAPKQGNMTAGTDGKTIDGMSIERIDRLIESLKDESYQPKPSRREYIPKKNGKMRPLGIPSIEDKLLQEVVRMILEAIYEGQFSDCSHGFRPQRSCHTAMEQISKSFCGAKWYIEGDIKGFFDNINHDVMIKILEKRIGDCRFIRLIRKFLNAGYIEDWQYFKSYDGTPQGGIISPILANIYLDQLDKYMEEYASKFDKGVRKEVSKLYRHYQRKKGRAKVALKKATTAEERNEALRLVKMYDSLMMVTPAKNEGDTNYKRLKYVRYADDFLCGVIGSREDAIKIKADIKEYLESKLRLELSEEKTLVTYSNNPAKFLGFEIRNRKCAETRRDTLGRKKRSRNKTVEIRIPKDTVKKKLLDYDVVEIKKHNGKEIWKPKARPELNFNDDLEILQRYNSEIRGFYNYFGIGVNCAKQMNNFGYIMEYSMYKTFAAKYRSKVTKICRKYKKDGIFTVSYQGKKGNTIEAKFYNGGFKRLKPSKDSRISTLPNFIMHTSTTSLMDRLKAQKCELCGATDRLEMHHVRKLKGLKGKEPWERMMIARRRKTIALCSSCHKKVHNGKA

SEQ ID NO: 2126 - protein, 603 aa, unidentified
  source 1..603: note = uncultivated organism;MG169-17 reverse transcriptase
MRNPEKVLNSLSVHSREQEYKYERIYRILFNPEMYYVAYQRIGSKPGNMTSGSDNETIDGMSLKRIEDMIGRLRDESYQPMPSQRVYIPKKNGKLRPLGIPAINDKLVQEVVRMILEAIYEPQFSNMSHGFRPSRSCHTALASIEKTFCGIKWFIEGDIKGFFDNISHEVMIGILNERIGDERFIRLIRKFLRAGYLEDWKFHHTYSGTPQGGIISPILANIYLDKLDKYVEEYIQSFDKGMGRKMSEMYKSLQYKRKWAMYKLKECREKGAKRKPLVNNLKTHIKAMASVSCGDEMDAGYKRLKYVRYADDFLMGVIGSKKDAETIKEDIKKYLTNRLSLEMSDEKTLITHSGDRAKFLGYEVCVQRSSSMRRSKDGSLRRAFNKRVRLMLPKDLIKKKLLSYNAVEIKTHNGKEFWKSKSRGGLTALDDLEILKRYNMEIRGLYNYYSLAHNCCEMAQFGYIMKYGMYKTYAHKYRTKSKAIHRKYDKDGVFTLTIQLKNGKSKDYTFYQGGYKRQSAIELAKIDYAPSLMVFKTTTSLIDRLKAGKCEICGATENLVMHHVRKLGELKGKSTWEKLMVARNRKTIAICSKCHKQIHLGNG

SEQ ID NO: 2127 - protein, 637 aa, unidentified
  source 1..637: note = uncultivated organism;MG169-18 reverse transcriptase
MRNSAKVLNGLSKHSPLSNYRYERLYRLLFNEEMFYTAYQRIYAKEGNMTAGSDGKTIDGMSLNRISKLIDLLRTETYQPQPARRVYIPKKDGKMRPLGIPSFDDKLVQEVTRMILEAIYEGQFLDCSHGFRPKRSCHTALVKVKRTFTGAKWFVEGDIKGFFDRIEHQILITILKERISDDRFLRLIWKFLKAGYVEDWTFHNTFSGTPQGGIVSPILANIYLDRLDRYMEKYAEEFNKGTKRKPHETRYGFENKKARLMQKLKNVKDENERREIVKQIKVIDKERITFPSCDEMDGGYKRLKYVRYADDFLIGIIGSKEDSKQVKNDIKNFLETELKLELSEEKTLITHTEKPAKFLGYEVSVRQSDLPRRDTLNRLTRTYNNKVCLRITMDIIKKKLLDFGIVEIRHNVNGKEWWKPREHTKMLNNDDLEILRMYNYTLRGFYNYYSVANNSAIMNAYGYIMEYSMYRTFACKYRTSVQKILRQYQRDGVFTVSYTTKKGGVRSQSFYKDGFKRKEPIADVNLDSQEVIYHSMRTSLIDRLKAEKCEICGAMGKLDMHHVRKIKDLDGKGYADKLMIMRQRKTIALCRSCHLKTHAGSIDRPFNGEPDTLRGVSPVRGRAFENLPSKYGKALGA

SEQ ID NO: 2128 - protein, 600 aa, unidentified
  source 1..600: note = uncultivated organism;MG169-19 reverse transcriptase
MRNSENVLNILSEHSTDSDYKYERLYRNLFNEQMFYTAYQSIYAKQGNMTSGTDGRTIDQMSIQRIDDLIVSLKNETYKPRPAKRVYIPKKNGKKRPLGIPSFEDKLVQEVTRMILEAIYEGYFEYTSHGFRPNKSCHTALTHIQKSFSGTKWFVEGDIKGFFDNINHEVLVKTLKERIADERFIRLIRKFLNAGYMEDWKFHKTYSGTPQGGLISPILANIYLDKFDKYMKEYAKSFDKGKERRGSTEYKRLENKRSRLVAKTKSGQNESVREQLMDEIRKVEKEMINTPYGLNMDETFKRLKYVRYADDFLVGVIGSKAECMQIKANIAQYMSEQLKLELSEEKTLITHAQNPAKFLGYEIYVRKSQALRRNRNGVLRRPFNGRIVLNVSNGTVRRKLLDYDAVYIKQVKGKEVWKTKARSYMIGMKPEDILAQYNAEIRGFYNYYSIANKISYLGNSFGFNMQYSMFKTIAQKQNMTMAQMIKKLRKGKDFIIPYIDKKGQKKVRVLYNEGFRRKTAKDYAQCDNIPNTNISPYPSLVERLKAERCELCGAEGKTVMHHVRTLKDLKGENEWEQQMLKKHRKTLAVCETCNAKIHVR

SEQ ID NO: 2129 - protein, 611 aa, unidentified
  source 1..611: note = uncultivated organism;MG169-20 reverse transcriptase
MQNAEQILQAMRKLGEKRIPLTRVYRCLFSEDLFLAAYDKIARNRGALTAGTDDDTVDGMNLERIRKIIGQLRKEQFRFHPSRRINIPKKSEGTRPLGLPNFSDKLVQEVIRQILETYYEPRFRDSSHGFRPGRGCHTALRRMSDKFKGATWFIEGDIRGCFDNIDHEILMAILARDILDGRLLNLLRMLLEAGYMEEWHYHRTYSGTPQGGILSPLLANIYLNELDAYIEDVLILQYTRGKKRAQNHEYYRLGKRIKVARSKGNIEDARELEQQRRQLPSGDVNDSCYRRFQYVRYADDFILGLIGTQSEAEEAKTAIGVFLKEKLHLEMSASKTLITHARTEHAHFLGYDISIYHGDDKLSSRTGSLTKFRSANGHVRLGIPYGKVAELTKRYQRGGKTIHEAGLLHHSDAEIVNVYQQRFRGLAEYYKYATDRSALGKLKYVMEIALTKTLANKFRVSVAQVYQKYGGSRQVDGRDYKVLVVTVPTSNGTRSIYWGGIPLKVVKPGSQPIDDNIGQRDLPLSSRTDLIQRLQANECEVCGSTDRCEVHHIRKLADLKSRWRGRKAKPAWVVSMIAMRRKTLVVCKTCHNAIHAGKPLPNNAHEFWRAG

SEQ ID NO: 2130 - protein, 600 aa, unidentified
  source 1..600: note = uncultivated organism;MG169-21 reverse transcriptase
MREAKRVLEIIRDRGYRGLPLERIYRLLYNPELYLMAYAKIAGNSGVLTPGVNKETVDGMNLGKIQGIIEALKYERYRFKPARRIYIEKENSKKLRPLGIPTWSDKLVQEVIRLILEAYYEPQFNPTAHGFRPNRGCHTALLEISNVWVGTVWFIEGDIKGCFDNLNHEVLINILSMKIKDNKFLRLISGLLKAGYMEQWKYNNTYSGTPQGAVLSPLFANIYLDKLDKFVETKLIPENTRGKQRARNQEYEIANARAYYAKKRGEVEKSKKWKQIARNLPSKDTKDPNYRRLRYVRYADDFILGFAGSKAEALEIKSKLQEFLREELRLEMSKEKTLVTHGRTGRANFLGHEISVAQNDTKIDQGGKRGVNGQIRLHVPVEKVNKFLLPYLLNGKPRRRPELLKESDYAIVGHFQTVYRGFAEYYKYAGDRSLRFKRVKRVMERSLVMTLANKHDSRVSKIYRKYGTKILTPKGQYKGLQVVVERVGKKPLVATWGGISLARVNPREEQRILVDKIHYHNNTGNELLKRLLADECELCGSQENVEVHHIRALKDLKKEGRKEPPDWVKRMSANNRKTLVVCHKCHQSIHHGKHDGIKTE

SEQ ID NO: 2131 - protein, 613 aa, unidentified
  source 1..613: note = uncultivated organism;MG169-22 reverse transcriptase
MDFARLSRKLEGLEKASRQGSKIVDLHRIMRHPDIWYEAYANIYSNKGAMSPGVDDVTVDGMSYERISNLINAVKEGNYNPKPVKRVYIPKKNGKLRSLGVPSGDDKLVQEVLRILLERIYEPIFIDVSHGFRPDRSCHTALMQIQKCWTGVHWLVEFDIKGFFDNMDHDILVSLLEKKINDKRFIKIIKRFLKAGYLEDWKYHATYSGIPQGGIVSPILSNIYLHELDKYMAELCRVFNKGKERPRNPEHQKISRRIRLLRKKLENLGNTPEVIQELKELQARQKCMPSGITHTEEFKRLKYCRYADDFICGIIGSRHDAEQVMQTVKDFLQHSLQLEIAPEKTRIRKAKNGIEFLSYGMRIQQGEKRVKMKVKGRYTTLRVTRGIIILSTPRHQVEQFCLKYGYGNWQDNKPLHRTELTSSSDVEIIETFNAELRGLSNYYALAKHVKAELSRLQYLSQYSLFKTLAYKHKTKVTKVIENLKVGREYIHRYKFKEGWKEIKVFQLKHMNISNKCRDEIPNTLHLTASTSELIKRMEANRCEYCGRVDSPVEVHHVHKLKDLKAKPNLKLWQKIMVARHRKTLILCAGAEDSCHRLLHQGKLPDNRYQPKNA

SEQ ID NO: 2132 - protein, 605 aa, unidentified
  source 1..605: note = uncultivated organism;MG169-23 reverse transcriptase
MQPTIEILEKTKKNSKKNKDEVFTRLYRYLLRPDLYYVAYKNLYSNNGAATKGVNDDTADGFSEEKVAAIIKSLSDESYQPSPSRRTYRQKANGKKRPLGIPTCTDKLVQEVLRMVLEAVYEPLFLDCSHGFRPKRGRHTALKYVKNQFTGTRWFIEGDIKGCFDNIDHHVLVNIISAKIKDARLQKLIYKFLKAGYMEDFQYNATYSGTPQGGIVSPLLANIYLHELDKFVEKQSAAFFKPRERLLTPEYSRISSEMARTKKKLQKAADTGNEDEKAFLLQRVSDLKAQLLKTPCKSQTDKQIKYVRYADDFILGINGDREDCQRIKNELSTFINDVLKMELSAEKTLITHSNQYARFLGYDIRVRRSNVIKPNGRGATQRTLSNQVELAIPLADKVMPFLFKNSIIRQENGKIEPIARTSLLRLTDLEIVSSYNAELRGICNYYHMAANFNTLHYFGYLMEYSCLKTLAAKHKTSIGKIKRKYNDKNGGWCIPYETKNGVKQLHLAKYSDSRNVKNPNDAISSVTMIHKNTRSTFEDRLKAKTCELCGTTTSERYEIHHINKLKNLKGKEPWEVMMLSKRRKTMVLCYDCHKKIHNQSFEVKQ

SEQ ID NO: 2133 - protein, 597 aa, unidentified
  source 1..597: note = uncultivated organism;MG169-24 reverse transcriptase
MQPTTEILEKISRNSLNHPDEVFTRLYRYMLRSDLYYLAYKSLYANNGASTKGINQDTADGFGPEVVERILTKLQDGSFQPKPARRIQISKANGKMRPISIPTFTDKLVQEVMRMILEAVYEPIFMNCSHGFRPKRSCHTALEQVKLSFTGARWFIEGDIKGCFDNIDHQTLIGLVSRKIKDARFIGLLWKLLKAGYLEDWRYHNTFSGTPQGGIISPILANIYLHELDRYVMKLQGQFAKPRDRAYDPRYAKIMHEIRAVNNQLDRAAAEEKPELVKEHKRLRLEIRRVPCKSQTDKRISYTRYADDFLIGVVGSREDCEQIKQELTAFVKAELKMELSEEKTLITHSNTYARFLGYDIRVRRNSIARRTANGRIKRVLNGKVERNIPVVDKIEKFLFSHDVVWKKDGKLEPCHRKSLLHLTDLEIVTAYNAELRGICNYYNLASNFNCLHYFSYLMEYSCLKTLGAKHKCNVAKILQMFKDGKGWSIPYMTQKGEKKVRIATYQDCENTCTCSDVIPMLTVQHLHSRNTFESRLMAHVCELCGSTDSQHYEVHHVHKVKDLKGKAVWEQIMIAKRRKTLVVCRECHKRIHGKKID

SEQ ID NO: 2134 - protein, 603 aa, unidentified
  source 1..603: note = uncultivated organism;MG169-25 reverse transcriptase
MRNSERVLNSLAKHSKQPDYKFERLYRLLFNEQMYYVAYQRIYAKEGNMTKGADNKTIDRMSISRIEKLISSLKDESYQSIPSRRVYIPKKNGKKRPLGIPAFNDKLLQEVVRMILEAIYEGSFDMNSHGFRPKRSCHTALRQIQRTFNGARWFIEGDIKGFFDNIDHGVMISILEKRISDERFLRLIRKFLNAGYLEDWTYHKTYSGTPQGGIISPMLANIYLDQLDRYVREYIQRFDKGKERADNPERIKFEYGKRLAVLKLEKVKDKEQRKSIVKEIKAYDKGRAAISCGVDMDENFRRLKYVRYADDFLCAVIGTKAEAETIKQDIKVFLQEKLALELSEEKTLITHGRKSAKFLGYEIYVRKSTQTKRNKAGKLTRPYNNKIYLKMPLETVRKKLLDYDALKINVHNGKEQYKSKHSTYLINNDDLEILERYNSEIRGFYNFYSLANNCHTLHSFKYIMEYSMYKTFAAKYKSTVVKICKKYKKDRVFTVYYKNNKGKTLMRQFYHDGFKRKKLDYAQCYDRMPTRYYSSPTSLVARLKACKCELCGKENVKLDMHHVRKLKNLQGKEDWEKHMIARKRKIIALCRSCHKKVDGGWMD

SEQ ID NO: 2135 - protein, 604 aa, unidentified
  source 1..604: note = uncultivated organism;MG169-26 reverse transcriptase
MRNPENVLITLTKHSNNKNYKYKRLYRLLYNEQLYLNAYQRIYSNNGSMTKGTDNKTVDGMSVERIKKIILTLKDESYQPQPARRTYIPKKNGKMRPLGIPSFDDKLLQEVIKMILEAIYEGHFEDTSHGFRPNKSCHTALDKIQKTFTGVKWFIEGDIKSFFDNINHDTLINIMKERIEDERFLRLIRKFLNAGYMEDWTFHNTFSGTPQGGIISPVLANIYLDKFDKYINEYISKFNRGKDRKRTTEYRKNEVALSKARNALKNASNEAERQAAISSIRQLEKERVNIPHSDPMDKSYARLFYVRYADDWLCGVIGSKDDCMKIKEDIKNFLYNELQLELSEEKTLITNAKKCAKFLSYEIRVRQSNLNKRDKIGRLVRNYTGRVVLEISSETIRKNLLETGALKLVYHNGKEIWKPKAIYRLKDCDDLEILDYYNSKIRGFYNYYCIANNSSIINSYKYILEYSMYKTYATKYRTTVHRIIEKYRLNKDFAVKFKNSKGIECTRLFYNQGFKRQKKAFYSNVDMIPNDIKYFSSTSLIDRLKAEKCEVCGKTNTPIEIHHIHRLKDLQGKKYWEALMIAKQRKTLALCRECHKKLHCGKLD

SEQ ID NO: 2136 - protein, 610 aa, unidentified
  source 1..610: note = uncultivated organism;MG169-27 reverse transcriptase
MRNPTEVLKNLMEKSKNETYRFQRLYRNLYNPEFYWLAYKNIYANDGSMTAGADGTTIDGMGNERIERIILSLKERSYQPKPARREYIAKKNSSKKRPLGIQSGDDKLVQEVVKMILESIYEPVFSNKSHGFRPNRSCQTALKQIQNTFTGANWFVEGDIHACFDSFDHHVVIDLLRKRIDDEAFIQLIWKFLKAGYMEQWTFNRTYSGVPQGSGVSPVLANIYLHELDKFMENYAENFNTEAKRKHFSTAYKSSVSKTYRYRKKGREIWNSLSEEEKKIRCKNLKKLEMIEKSTTPYVYNDSNYKRVQYTRYADDFIIGVIGSKADAEAIKKDVKIFLQKALKLEMSDTKTKVTHTGDRARFLGYDITVSRVQTLKKTSNGKVQRCQTGVVKLYVPREKWVGKLIEYKAIKIKINENGKERFVALHRGKLVNQSDIEILARYNAEVRGLYNYYSIANDSFKIGRFANVMKYSMYKTFACKYKTNVHEIKRRYCRNDLFTVAYETRQGTKTTTFYKDGYKRKECATKFDNVNELPQFSKYAKTNTLKQRVERHTCELCQKDCRNLVIHQVKKLKDLKGNAEWVLLMRKRRRKTLVVCPECHNLIHSQHRK

SEQ ID NO: 2137 - protein, 611 aa, unidentified
  source 1..611: note = uncultivated organism;MG169-28 reverse transcriptase
MRNPENVLKSLTTCAEQADYQFKRLYRNLYNPEFYQLAYQRIYAKPGNMTQGTDGLTIDGMGMERINKIILSMKDHSYQPKPARREYIKKQNNPKKKRPLGIPSVDDKLVQEVIRNILESIYEPAFSPNSHGFRPRKSCHTALQQIKSTYTGTKWFVEGDIKGCFDNIDHHVLVDILRRKIKDEYFIALIWKFLKAGYLENWQYHSTYSGTPQGSLISPVLANIYLNEFDNFMSKYEKEFYKGKKRKQTKAYIKAANDYQIAKRKLKKQWDNLTDAEKKQENRQIKDLKNIMLNTVYNEPMDNGYKRLKYVRYADDFIIGVIGGKEDAERVKHDIGEFLLNELKLTMSEEKTLITHGAAHARFLSYDIEICNNQSVSTDENGNKARRHSGKARLLMPREKWLNKLREYKAFTVTHDKTKGNAEIWKPAHRANMLNNDDLEIMLQYNAEIRGLYNYYCLAENVSSLHSFGYIMKYSMYRTYAMKYKTTIGGVMNRFYRNGRFGIPYQTKTGDKTMYAYDEGFKKLDTPLHDIDSVSMNNRFNLSSNSLITRLKAKRCEWCGEENCDIEIHHVRKLKDLKGKALWERKMIARKRKTMALCKQCHVNLHSGKLD

SEQ ID NO: 2138 - protein, 599 aa, unidentified
  source 1..599: note = uncultivated organism;MG169-29 reverse transcriptase
MQSAQTVLSMLKQKSKQDETYTFERLYRNLFNETFFLRAYQKLYPKEGNMTPGIDNTTIDGFSKQTILKLIELLKEEHYWPKPSRRTYIPKKNGKLRPLGIPCFEDKLVQEVIREILEAIYEPIFCECSHGFRPNRSCHTALNQIKRKSRGATWAIEGDITRCFENIDHDILINLLSKKIDDGRLLVLIQRFLEAGYFEFKVVHNSLSGTPQGNGLSPILANIYLHTFDLYLEELSKQYSKGTEKHRNPLYKQLISQRQKAIRQGDKAKAMQVLKQMQTIPSANPMDELFIRVHGCRYADDFLVCVTGSRALACEIKEKLGDFLKQTLKLELNQEKTSITNLAKTRVRFLGYELSKSQCNTKLTKDRHGHKRRSINGNIQLLVPGQVIRDKLEPFRIGCKPYPCKARSNLSIREIFDMYNAEIRGLYEYYCLATDVSKKLTRFKYFHYGSLLKTIAGKERSSVMAVVCKYGVVVPRRQGTGVKRIIGVQYETKAGSKTMTYFDEPLVWVKYPPVKLLDFFGPLLGGGHLLKRFRACVCELCGSSDGVVVHHVRKLKEVKQRYCRQGKMPPVWAATMLKIRRKTLVVCHSCHAEIHSVKL

SEQ ID NO: 2139 - protein, 592 aa, unidentified
  source 1..592: note = uncultivated organism;MG169-30 reverse transcriptase
MRTAQTVLTVIQERGKQHKPIERVYKLLFNRDLYLNAYAKLYPNNGAMTKGVTEETVDGMSIQKIDRMIELLREEKYQWKPARREYIPKKNGKKRPLGIPTWGDKLLQEVMREILEAYYEPQFSTHSHGFRPNRGCHTALQEIQVWKGTRWFIEGDISKYFDTIDHAVLLKILERNIHDGRFIRLVANMLKAGYLEDWKFNQTISGTPQGGVISPLLANIYLNEFDQWIEKVLIPNNTRGKRQKANPVYSRMSAEISKARKNSDIQTAHRLKVERRNIPAVDPYDENYRRCRYVRYADDFLIGFTGSKADAEEIKAAMHDFLEKELHLELSKEKTLITNASSQAAKFLGYEIKAQRVNDYLDPKGRRGANGAIALFVPARVIEDRCRSFKQNGKVTHRNALLHDDDFSIVQRFQQEYRGLVQYYILAQNLSWFSKLYWTMETSLLKTLACKHRSSIKKQKAKYKTTTTSTSGKTVPCLQVVVERPGKKPLVATWGGISLAHKRKAVIEDKPYKVYGGRTELIKRLTADICELCGSRKDIEVHHIRKLADLKTKGKSAPPVWVQIMAARQRKTLVVCRECHTAIHNGTLNTRS

SEQ ID NO: 2140 - protein, 602 aa, unidentified
  source 1..602: note = uncultivated organism;MG169-31 reverse transcriptase
MRNPEQVLNILAGHSNEPEYKYERLYRILFNEQMFFVAYQRMYAKPGNMTPGTDGKTEDEMSIDRINKLIESIKDETYSPNPAKRTYIPKKNGKMRPLGIPSFEDKLVQEVVRMVLEAIYEGHFEWTSHGFRPNRSCHTALKSLQNNFNGAKWFIEGDIKGFFDNIDHNVLIEIMKGRIADDRFLRLIRKFLNAGYMEEWQFNKTYSGTPQGGIISPILANIYLDKFDKYMDEYANKFNKGTARSRNKDICKLNSRVHYLKRRINEVEDVNVRTRMVEELHEKQKLILTMPSGNDMDVNFRRLKYVRYADDFLIGVIGTKNECERIKADITKFMQEKLRLEMSQEKTLITNAQDSAKFLGYEIYVRKDYATKRNSNGTVRRYFNGNVILHVSREVIKNKLLSLEAMKVVTKHGKETWVSKGRTYMIDNEAHEIVSQFNTEIRGFYNYYSIANNASAMGRSFGCIMKFSMYKTLAQKLNMSVRKVIERYRKDNLFAVPFVNKGGETKYRVFYNEGYARKTDCETAPSDNLPYMFKTPSLSLIERLTTKTCELCGKHGEVVMHHVRTLKELKGKNDWERKMLYMHRKTLVVCAECNAKIQRCVK

SEQ ID NO: 2141 - protein, 596 aa, unidentified
  source 1..596: note = uncultivated organism;MG169-32 reverse transcriptase
MRPAETILAVIRDRGTRGLPLERVYRLLFNRELYLWAYAKVSRNTGARTRGSTPETVDGMSQAKIDALIDELRHERYRWTPSRRISIPKRNGKTRALGRPSWSDKLLQEVLRMILEAYFEPQFSDHAHGFRPQRGCHTALHSIQQTWKGTVWFIEGDIAQYFDTIDHEVLVKILGEYIHDGRFLRLIRGLLTAGYMQEWKFNKTLSGTPQGGVLSPLLSNIYLSRFDQWVTDTLIPAYTRGLRRKPNRDYHRINNQLYEMRKRGRSEGVRDLVKRRRLLPEGDLADASFRRLRYVRYADDFLLGFIGTRAEAEDIKRTVQEWLRVHLNLTLSTDKTLITHAKTQMARFLGYDITGRMANDQLDVMKRRVLNGHMELRVPNEVIEAKCARYYKRGKVLHRPELLAESDYSIVTRFQQEYRGVVQYYLLAHNVRYLSRLRWVMEQALLKTLAAKHHVSVRTIWQRTATTTRTTSGQPLRCFEVRVERQGKPALIARFGGISLKRQPHASLNDQPYVYKVSGTEILQRVLADACELCGAREDIQVHHIRKLADLRQPGRKEKPAWVKIMAARRRKTLVVCRSCHGAIHAGKPPRQRITE

SEQ ID NO: 2142 - protein, 603 aa, unidentified
  source 1..603: note = uncultivated organism;MG169-33 reverse transcriptase
MRSPERVLNSLSEHSKNSSYKFERLYRILFNEEMFYVAYQRIYAKEGNMTKGSDGQTIDNMSLKRIERLIGTLKDETYQPQPSRRVYIPKKNGKKRPLGVPTFNDKLIQEVVRMVLEAIYEGSFEYTSHGFRPNRSCHTALAHIQKEFSGAKWFVEGDIKGFFDNINHDILINILKERITDERFIRLVRKFLKAGYIEEWQFHNTYSGTPQGGIISPILANIYLDKLDKYIKEYTVKFDKGKKRKFSRESMDFSNAKKRIVRRLKSVKDEKQRAKLILELKAIEQGRAKYPNGEEMDTNYRRIKYARYADDFLVGIIGSKQDAQQIKEDIKNFLADRLTLELSDEKTLVTHTERPAKFLGYEITVRKSNDQRRDKMGRLRRTYGKRVCLNVNMETVRKKLFDWGVLEITNRNGKEIWKPKCKPGLIFNDDLEILDSYNREIVGFYNYYSIANNCAHALNNFKYIMEYSMYKTFAGKYKSRTRKINKKYRKNGRFIVKHMTKAGVKERYFYDGGFKRKKPTYKSECDIMPRTIYTAGRTSLVERLKACVCELCGATDDLVMHHVRKLKNLQGKESWERHMIARKRKTIAVCRSCHKKIHDGKID

SEQ ID NO: 2143 - protein, 596 aa, unidentified
  source 1..596: note = uncultivated organism;MG169-34 reverse transcriptase
MQPTTAILDRIMKNSRNNKEEIFTKLYRYMLRPDLYYLAYNKLYRNKGASTKGVDDDTADGFSEEKISKIIQSLADETYTPKPVRREYIPKKRNSAKKRPLGLPTFTDKLIQEVLRMILEAIYEPTFSDFSHGFRPNRDCHTALNSLKQEFTGVTWFIEGDIKGCFDNIDHHVLVDIINSKIKDARLIKLIWKFLKAGYMEDWKYNSTHSGCPQGGVISPLLSNIYLNELDKFAEKTAKDFYKPRDRVRTPEYAKVAHKKYYATKLLKTATGQKKSELLKKVKVLKSELRKVPCTSKTDKVIKYIRYADDFIIGVKGDRADCERIKQQFSEFISGKLKMELSEEKTLITHSNNYARFLGYDVRVRRDQTAKPSGDKLLRTLNYTVELNVPFADKIMPFLFDKAIIKQTHGGEIEHIARKYLYRCTDLEIVDTYNSELRGICNYYGIASNFISLNYFAYLMEYSCLKTLAGKHKSTSKKIRDKFPAKGGGWGIPYDTKKGQKYRVFAKFTDCKGGNSFNDVIVEYAIRHAGMTTTLEKRLSAKVCELCGKTNTPLAMHHVNKVKNLKGKEQWEIVMIAKKRKTLAVCKDCHHKIHHP

SEQ ID NO: 2144 - protein, 607 aa, unidentified
  source 1..607: note = uncultivated organism;MG169-35 reverse transcriptase
MIHLRNPNNVLNSLTEHSSNKDYKYQRLYRLLFNNELYFIAYQKIYAKEGNMTKGSDNRTIDNMSLQRIENLISSLRDESYQPKPARREYIPKKNGKMRPLGIPSFEDKLLQEVVRMLLESIYEGYFEPTSHGFRPKCSCHTALTCIETYYTGSNWFIEGDIKSFFDEIDHNIMIDILRGRISDERFLRLIRKFLKAGYIEDWQFYKTYSGTPQGGIISPILANIYLDKLDKYMKEYADNFNKGQKRQVTKEYIAINGKRARLVLKMKKATDESAKKEILSQIKALDKQRLEIPSVNYMDENFKRLKYERYADDFLIGVIGSKEDCKRIKSDIKEFLKKKLNLELSDEKTLITHTSKSARFLGYDISVRRSNGHAKYDKRHRLCRTMNGKVVLKIPMEIVKRRLLDYKAMVLKTHNHKEIWKPVSRDALVNNDDLEILRQYNAELTGFYNYYSIAINSGVLNNFKHIMQYSMFKTLANKYRTSKTAIIKRMRTGKDFGVRYSANGKEKIALFYSGGFGRKKLQYGVNFDVIPNTAKFGARTSLIDRLSARVCEYCGKTDVDLYMHHVRKLKSLKGKEDWEQFMIARKRKTLAVCDECHRKIHNGKMD

SEQ ID NO: 2145 - protein, 603 aa, unidentified
  source 1..603: note = uncultivated organism;MG169-36 reverse transcriptase
MTSTQDFLDIVHQCGQRGIPIRKVYRRMKDKDLFLAAYGKLYKNAGSLTPGITDNTVDGMSISRIDSLLEKLEQGTFQWTPVRRTYIPKKNGKLRPLGMPTWEDKLVQEVIRMILEAYYEPNFRDSSHGFRPNRGCHTALISIREAWNGTVWFIEGDIKGCFDNLPHDTILRVIERHFHDTRFLKLIRDLLTAGYMEEWQYHATYSGTPQGGIVSPILANIVLHELDTWIEDTLIPEHSRGKLRQRNLEHLRLSQLEHQAWAEGNIPEGKYWRSQKWQQPLGKPHDPHYARLRYCRYADDFILGWAGSKQEALQIRDQIARFLQEELGLELSMEKTKLTHATTERARFLGYELKVSRDNSKTKTYRHRNGQMIKGRSVNGDIQLLVPQTVRTEWVSRYADGQDKAIKQMRWLHLPDFDIIAHFGGQWRGLVNYYALAMNVKTLSHVEWAMARSLQATLARKHNKKTRWVRKAYQTHENGKRAYVCKVPNPNNPDKPLKAIFGGLPLRTRRDAKLNDRMYVPFLVRTQLVQRLLAQKCEVCGNEGDAEVHHIRKLADLKRRWQHRKSRPFWVARMIEMRRKTLVVCKHCHWEIHNGTYDSQKVN

SEQ ID NO: 2146 - protein, 597 aa, unidentified
  source 1..597: note = uncultivated organism;MG169-37 reverse transcriptase
MQTADTVLNVIQQRGEKGLPLLNRSTYRLLYNPELFQLAYHNLASNKGAMTKGSTDETADGMSQAKIASIIEALRYERYDWTPVKRVYIPKSNGKTRPLGIPTWSDKLLQEVIRLILEAYYEPRFSTQSHGFRPDRGCHTALTHIEAAWHGTKWFIEGDITGCFDNIDHSVLLDILKRDIHDNRFLILIGNFLRAGYMEDWKLVKNFSGTPQGGVLSPLLSNIYLHELDEYVETELIPQHNRGKQRKQNAAYVRIYNKRYYWRKKGDYSRDKEFTAEMRSLPTGDQFDPDYRRLRYVRYADDFVLGFAGPKEEAIQIKENLATFLRDNLKLELNQDKTLITHAGTTPAKFLGYEIIVRKANDKIANGIRSMNGKLSLRVPKTAIDAYCDKYRHNNKPIARPELINDSDFAIINQYGLELRGIVQYYKLASNAHHLWRLSRFMERSLLKTLANKHKSSSRKMKRRFQTVNTTNDGKVLKCLMVVIPREEGKPPLKAMFGGHSIRRDRRAIPKDFVLKRYFPVRSDLVTRLLADKCELCNQHGNIEVHHIRAMRDLNVKGQKEKPEWIRRMAALRRKTLAVCRQCHHEISHDGSWKPRT

SEQ ID NO: 2147 - protein, 602 aa, unidentified
  source 1..602: note = uncultivated organism;MG169-38 reverse transcriptase
MRNPEIILNTLCSHSSDADYKYERLYRLFFNEELFMVAYERIKSKPGNMTPGSDGKTIDGMSLERINALISSLKDESYIPNPAKRVYIPKKNGKLRPLGIPTIEDKLVQEVARMILEAIYEGYFEDTSHGFRPSRSCHTALNSLQKRFTGSRWFIEGDIKGFFDNIDHSVLVDILRKRIADERFIRLIWKFLRAGYLEIWHYHNTYSGAPQGGIVSPILANIYLDQFDKYMAEYAENFKKGNKRKVNPEYDSLNKKLAKVRKKWKSETDETVKACLFERIKELQAKCLSVPAGLQMDANYRRLQYVRYADDFLIGVIGSKADSKSIKADITQYMSEKLLLELSAEKTLITHASENAKFLGFDITVQTLDDTKRNKRGVIQRMFVGVVKVNLSSETVRKKLIELGAVKFTQEKGKEVWKPKARTPMIGMKPHEMVAQYDLEIRGFYNYYGFANNSSEACAGFGYIMSYSLYKTLAQKLNSTVQGILAKYKKDKVFTVSYKDEKGKDRTRTLYNGGFKRRKPSEFDFCDRLPCTMYLPKATLADRLRSCICEICGAKGPLVMHHVRTLKTVNGDTPWGRQMLYRHRKTVAVCAECYAKIKESER

SEQ ID NO: 2148 - protein, 601 aa, unidentified
  source 1..601: note = uncultivated organism;MG169-39 reverse transcriptase
MRSPERVLNSLNEHSKDSSYKFERLYRILFNEELFYVAYQKIASNGGSTTKGSDGRSIDEMSLARIETLIASLKDESYQPHPSRRVHIPKKNGKTRPLGIPAFEDKLVQEVVRMILEAIYEGHFETTSHGFRPKRSCHTALLHIQKTFSGAKWFIEGDIKGFFDNIDHDVLVGILRERISDDRFIRLIRKFLKAGYVEDWTFHNTYSGMPQGGIVSPILANIYLDKLDKYVKEYIRHFDMGTKRRPGKESNDLANERKRTVRKLKKIKDGTEKAALVARLKAIEQERAAFPSGDEMDGSYRRLKYIRYADDFILGIIGSKEDALRIKEDIKSFLSESLALELSEEKTLITHTGKSAKFLGYEITVTRNNHQRRDVQGRLRRTYGKRVRLNVSMATLRDKLLEYGAMEIKLRNGKEIWKPKCRSGLIFNDDLEILDRYNRETVGFCNYYLIANNCVVLHNFRYIMEYSMYKTFAGKYRSTVRKINKKYRLNKLFTVKYEQKGVIKSRTFYKTSFKRRTTAFNGSCDIEPYSIADVSRTNLTDRLKAEKCELCGATGKLIMHHVRNLKDLKGKESWKRLMSARKRKTIALCPSCHRLRHLGKV

SEQ ID NO: 2149 - protein, 603 aa, unidentified
  source 1..603: note = uncultivated organism;MG169-40 reverse transcriptase
MEKSERVLKALSDHSQSSDYKYERLYRYLFSEEMFAVAYQRIYAKQGNMTPGTDGKTIDEMSLERIERLIVSLKDESYQPHPARRVYIPKKNGKKRPLGIPSFEDKLVQEVVRLLLEAIYEGHFEGTSHGFRPHRSCHTALGMIQKSFAGAKWFIEGDIKGFFDNIDHNVLINILRERISDERFLRLIRKFLNAGYVEDWKYNKTYSGTPQGGIISPILANIYLDKFDKYIKEYAAKFRKGDRRSINPEYWRLNNKKNWLKKKLQKTSDEQMRKSYLYEIAQLSKQMLSTPHKDAMDADFRRMQYVRYADDFLISVIGSKSECETIKADITQFMREQLKLELSDEKTLITHAQDKAKFLGYEIFIRKSDAVKRNKDGVLKRDFNGAVVLTLNSAVIQKKLTEYNALEVRNIDGKDIWWSKPRRYMTPMKPEDILAQYNAEIRGLYNYYSLAANVSKECASFAFIMKMSMLKTLGWKLNTSARKVRQKYQKDKDFVIPYNDAKGKQKYRVFYNEGFKKRNAQFDVDYDKLPQTMYVPYPSLVERLKDGRCELCGKEGKVVMHHVRTLTKLKGNNEWEKLMLKRHRKTLVVCEDCNSMIQNYGKE

SEQ ID NO: 2150 - protein, 605 aa, unidentified
  source 1..605: note = uncultivated organism;MG169-41 reverse transcriptase
MKRNPEKILNSLTQHSSDLAYKFERLYRLLFNEEMYYIAYQRIYTKQGNMTKGVDGKTIDGFCISHIERLIGTLKDETYQPNPSQRVYIPKKNGKMRPLGIPSFIDKLLQEVIRMILEAIYEGSFENSSHGFRPQRSPQTALWSIQKTFNNTKWFIEGDIKGFFDNIDHEVLIAILSERISDMRFLRLIRKFLNAGYVEDWVFHKSYSGTPQGGIISPILANIYLDKFDKYIKEYTQKFNKGKRRKENPIAKQLGQKKYYLTTKLKQAKNETERRLLLKQIGEVVKERLKYPASDEMDADMKRLKYVRYADDFLIGVIGSKEDCIKIKEDIKQFMADKLKLELSDEKTLITNARKHAKFLGYDVFVRKSNDTHRDKNGHLTRSLDHKIVLYVTTEVMRKKLLEYDAVKITVQKGKEVWKPKGRTYMRCLDDLEIISQYNSEIMGFYNYYSIANNSPVIDSFYNIMEYSMYKTYAAKYTTSKKKIIAKYKKNGVFSIPYTNKKGYEVRREFYDKGFKRKELPNRTLDDRLPNTVAITGGRNGLITRLNARVCENCGATDNLEMHHVRKLKDLKGKSDWEIKMISRNRKTLAVCSVCHHKIHSGKLD

SEQ ID NO: 2151 - protein, 603 aa, unidentified
  source 1..603: note = uncultivated organism;MG169-42 reverse transcriptase
MRVPRVVLDNLASKAKEKDYKYQRVYRNLYNVQFYLEAYSKMYAKEGNMTEGTDGQTVDDMSLERINKLIQRLEDQSYQPNPARRVYIPKRNGGKRPLGIPSFEDKLVQEVVRRILESMYEETFSIRSHGFRPNRSCHTALDQVHKTFTAVKWWVEGDIKGFFDNIDHHVLINILKRRIDDEKFINLIWKFLRAGYIEDWKLNNTYSGTPQGGIISPILSNIYLNELDRFVHKLKEEFDVGEKRSRNTMYRTACQRTQRLRAKYKTVWDDLNDEEKKVAAKEVKALAKDAQRFPTVDPYDDGYKRIQYVRYADDFLIGVIGSKDDAKEIKDKLTTFLRDELKLELSQEKTLITNSRNKARFLSYDIYVARDDSTRQCEDGNLRRSYNARVKLSVPMEKWRNKLLSLGVLEIDPNGKWNPVHRRELVNNDDLEILSIYNAEIRGFYNYYKLAFNVHTLSKFHYVMKYSMLKTYANKYKSRISTMKKKFSVDGKIAIRYETTKGLKVRFFYDEGFKKQELTNEGNVDNLPETVIYTSRTRLIDRLVARQCEYCGAEYVPIHMHHVRRLKDLKGKKNWERFMIARARKTLALCKTCHVDLHAGKLD

SEQ ID NO: 2152 - protein, 611 aa, unidentified
  source 1..611: note = uncultivated organism;MG169-43 reverse transcriptase
MAKGDRSLDVQGREVREMRNAETVLGVIQERGRRRLPLGDVYRQLFNPELFLHSYSRLYRNDGAMTKGVTAETVDGMSLGKIGGMIDQLRFERYRWTPVRRVHIPKKDGKTRPLGIPTWSDKLLQDVVRAILEAYYEPRFSDHSHGFRPGRGCHTALQRIKRVWHGTKWFIEGDIKGCFNNIAHAILLDILREAITDNRFLRLIQNILQAGYLEEWRHHPTLSGTPQGGTVSPILANIYLDRLDRFVEQTLIPEYTKGKRRAKNPGYNQMSGRACYCRKTGRVEEAKRLEQARRAVPANDPHDPDYRRLYYVRYADDFLLGFAGPRSEAESIRDRLKAFLAQGLRLELSEAKTLITHANTQKARFLGYDISVTQCNTKIGGNRRSVNGGIALRMPASFIADRSRFYMRDGQAIHRMERTHSSDYSIICQYQAEYRGFVQYYQLADNIAWLSSLQWVMRTSLLKTLAHKHKSTVTKMARRFATRVSTPFGPRVCLETSVPRVGKEPLIARFGGIPLRTSLTAYIEDLFLTRRRQGGTELLQRLLAGECEACGSTENVEVHHVRKLADLNRQGRKPPPDWVRLMASRRRKTLVLCRVCHDNIHAGRPLRSKTE

SEQ ID NO: 2153 - protein, 597 aa, unidentified
  source 1..597: note = uncultivated organism;MG169-44 reverse transcriptase
MRNAETVLGIIQERGKKGLPLEDIYRQLYNPDLYLRAYARLYSNKGAMTKGTTSETVDGMSLKKIESIVDDIRHERYRWTAVRRVYIPKKNGKMRPLGMPTWSDKLLQEVIRLILEAYYEPQMSDHSHGFRPRRGCHTALCEVKRVWTGTKWFVEGDIKGCFDNIDHEIMMSILREKLHDNRFLRLMEGLLKAGYLEEWHYHRTHSGTPQGGVISPMLANIYMDRLDKYVENVLFPAYNRKERRRVNPDYKRILDKASKLRKKGKKKEASMLRKQQLQLPYYDPNDEEYRRLRYVRYADDFLLGFAGPMAEAEDIKEQLRIFLHDQLKLELSQEKTVITHARTSAARFLGYEIAAQFANDKLDPVRRERSVNERIELRVPADVVKKNCAEYQAQGKPIHRKELTTESDYAIMEKYQWKYRGLMQYYALAMNIARLQTLHWVMRLSLLKTLASKQQATVNQMVKKYQTDMETPYGTMKCLEVRVERDGKKPLIARFGGIPWRRQNKAILLDKPSLPIVTPRNEIVKRLLRDTCEMCGSKENISVHHVRALNDLKVKGRKEKPLWVQKMAAMTRKTLVVCGYCHAAIQTGKPTRQPIQG

SEQ ID NO: 2154 - protein, 612 aa, unidentified
  source 1..612: note = uncultivated organism;MG169-45 reverse transcriptase
MRKGAKCSMQNSEIVLYNLSKQSMKDGYTFDRLYRHLYNEDFYIKAYTKIYKNKGSATKGIDEETADGFGEENIQAIIDTLKNESYQPKPIRRLHIPKKNGDTRPLGIPTFTDRIVQEVCRMILEAIYEPKFSNHSHGFRPKRSCHTALIEMKKTFTGVNWFIEGDIKGFFDNINHQILITILRKRIKDEKFIRLMWKFLKAGFVENWRFQKTYSGTPQGGIISPLLANIYLNEFDDYIEKELKPSFDLGEPKKRKRNTEYRKYDMRNQRLHKKINATEDEVLRKEMIEEYKANKKILLNLPYYESNTDTYKAIKYVRYADDFIVGVNGSKEDCEMLKQAMKDFLQNYLQLELSEDKTLITHSTKFANFLSYDISISNDLSTAKDKNGVIKRKYRGYVQLRIPKGTIEKVIVKNKMVKDIDAKQWDMLHRPRLVGLSDLEIIETYNAELRGLYNYYALAENVNRKMWQLRYVMEYSCLKTLANKYKSSVAKMKVKFKQGKYWGVKYETKQGERIAYFYKDGFEKKKESVRATIDELPNLYVYQGRNDLEKRLSASQCELCGDNHPDTKFEIHHINKVKNLKGKEYWEWTMLAKQRKTLVVCDKCHKEIHKQR

SEQ ID NO: 2155 - protein, 605 aa, unidentified
  source 1..605: note = uncultivated organism;MG169-46 reverse transcriptase
MQNANTIYAVMQERGKKGQPVERLYRMLFNKELYLQAYAKLYPNKGAMTPGVTPETADGMSMEKIDSIIEAIKHERYQWTPVRRTYIKKANGKQRPLGLPTWSDKLLQEVIRFILEAYYEPQFSDFSHGFRPGRGCHTALVKVQKTWTGVKWIIEGDISSYFDTIDHSVLLDILREKINDNRFIRLIEGLLEAGYMENWQYNKTYSGTPQGGVLSPLLANIYLDKLDKHVEEAIKVFDKGTKRAPNREYASISGQKRRAVRKGAKELAKGLTKRLRNLPSVDPNDPNYRRLMYVRYADDFMVGVIGTKVEAEEIKQRIGNFLMGKLKLKLSEEKTLITNAAQETARFLNYEIKNQNSDTKLIETIHRVKRRSVNGRIALLMPKSVFEKNSKPYLKKGKTASVPHLEINSDFAIVTEYQAKLRGLYQYYALATNVSRLNHLQWVMEQSLMKTLAAKHKSSAHAMYMKLATKVQTDKGKSLKCIQVTVERDGKNPLIARFGGFSLERQRVWEIDDKTPASMNHLGTHTEILQRLLADRCEVCGSTDKIEVHHVKKLSEVQGPKNERTDWKKYMASRQRKTLVVCKKCHQAIHAGKPLPALANHRRAG

SEQ ID NO: 2156 - protein, 600 aa, unidentified
  source 1..600: note = uncultivated organism;MG169-47 reverse transcriptase
MRDSANVLNSLAGHSQDPNYKFERLYRLLFNENLYALAYQKLSQNAGNYTKGTDGQTIDGMSIKHIHSIIGQLKDESYRPCPARRIYIPKKNGKQRPLGIPAFKDKLVQEVVRMILESIYEGHLEDCSHGFRPHRGCHTAMASLQKGGTGARWFIEGDIKGFFDNINHDVLIGILAERINDERFLRLIRKFLKAGYMEQWEYKNSYIGTPQGGIISPILANIYLDKLDKFMRNYINVFNKGKARVRNPEYKRVANRKDKRVKKLKNETDEQKKEALRREIAILHREMQQLPATLDMDENFKRMRYVRYADDFLICVIGSKEDCVKAKGDIKTFLQDTLKLELSDEKTLITNSHDAAKFLGFDVTVRSMDKTRKDFRGIPIRSLDHKVVLLLPYEVMRKKLLDYNAMRIIIKNGKEAWESTSRPYLRSNDDLEILNRYNSEIRGIYNYYCIANNVNILNSFYYYMKESMYKTLSSKYESTVRKIIRKYCRNKVFTVRYENNKGEMLERTIYHGGFKQRKDARIDNAHIMPSYRGTESTSLMARLKARECEYCGAEDNLRMVHVRKLKDLKGKQEWERFMIARQRKTIAVCENCYRKIHEKK

SEQ ID NO: 2157 - protein, 608 aa, unidentified
  source 1..608: note = uncultivated organism;MG169-48 reverse transcriptase
MRNPIHVLKYLEEKATCKNYKYERLYRNLYNPEFYLIAYQNIAKSQGSMTPGTDGITLKGMSLERINKIIVKLKDHSYQPNPVRRTYISKKNSKNKRPLGIPSTDDKLIQEVIRMILEAIYEPTFSDNSHGFRPKRSCHTALIQTQHLFKGTKWIVEGDIKACFDSFDHHVLIDLLRKRINDECFINLMWKFLKAGYMEQWEYHKTYSGTPQGSGMSPILSNIYLSEIDLFMEEYKKSFDLGVTGKRKVTSEYNSVQNRYFRLLTQYRESKSTLNADELKILLKEIKQLQKKRLMLPYNLNIDPNFKRIQYNRYADDFIIGINGSKADAEKVKEDIKVFLRENLKLILSEEKTKITHSAERCRYLGYDISISRSKAYKRLENGVLRRTLYGAVQLLVPSEKWISKLREYKTYKVIKGENGKEWWKVLHRGSLLNKKDVEIVSKFNSEIRGIYNYYRLAYNASSLNNFYYIMKRSLQKTFASKYSTTVSKIRNKYEKDGVFCVQYSTNSGLKTCEFYHEGFARKSEIALEWIDNLPQYKKYDKPNTLGNRLKQKTCELCGSRCNEIKMYHVRTLKELSDTKPWEIKMKAIRRKSLATCTNCFETIQNSK

SEQ ID NO: 2158 - protein, 580 aa, unidentified
  source 1..580: note = uncultivated organism;MG169-49 reverse transcriptase
MRNPINVLNSLQQHSSDKSYVFERLYRNLYNRDLFLLAYQNIYSSQGNMTQGADGKTIDAMSLNRIDGLIASLKNESYKPQPSKRTYIPKKNGRMRPLGIPSFDDKLVQEVVRLLLESIYENSFSRNSNGFRPNLSCHTALTQIQKTFTGVKWFVEGDIKGFFDNINHDTMIGILSKRIKDERFLRLIRKFLKAGYLENWQFHNTYSGTPQGGIISPILANIYLNELDKYVEKLKAEFDKGKRRRAFPQSTAIAKQRKKLINAMQTSNDENEKRFIAKQIAELDKEKLNVPYSDPFDDNFKRLVYVRYADDFLIGVIGSKQEAKQIKEKIKIFISENLKLELSDEKTLITHSEKKARFLGYDIFVRHTNATKTNSLGYTRRFLSGTVCLEMPMEIMRKKLLDYNAMEIVKTVKGKENWKPKARSYMINNDDLEIIEQYNSEIRGFRNYYSIANNSAYAGSFGYIMQYSMFKTYAGKYRTSMRKAISKLRIGKKFGIEYTDKNGRTKTRFFYNDGFARKPMQRKAKLDNIPNTVKYSAKTSLMDRLSARQCELCGKTNTDIEFIISENSKISKVKHSGSVL

SEQ ID NO: 2159 - protein, 599 aa, unidentified
  source 1..599: note = uncultivated organism;MG169-50 reverse transcriptase
MQPTTDILARISRNSLANKDEIFTRLYRYMLRPDLYFVAYKNLYANSGAATKGANDDTADGFSEAKIAKIIQKLADETYQPTPVRRTYIQKKNNPKKKRPLGIPTFTDKLVQEVLRMVLEAVYEPVFLPVSHGFRPKRSCHTALKSLKREFNGMRWFVEGDIKGCFDNIDHDVLVGLINSKIKDARMMKLIYKFLKAGYLEDWKYHKTYSGTPQGGIISPLLANIYLHELDKFVMKLKSEFDTHGQEPVRTEYRLLSNEIQKLSYHIGRSTGAEKERLLEEYNQKRKLMLKMPCTAQTNKRLKYIRYADDFILGVKGSKEDCQWMKSKLSEFISGTLKMELSEEKTLITHSSECARFLGYDVRVRRSAVIKHGGPGNKTKRTLNNSCELAIPLDDKIHKFIFANKIAIQKPDGKLMPVHRASLLRLTDLEIVSAYNAELRGICNYYGIASNFYKLCYFSYLMEYSCLKTLAAKHKCTISKVVKKFKDGNGKWGIPYETKTGTKRCYFAKYSDCKGKADPTDTVCNAAVEYGYCRTALEQRLKAKICELCGTTESDCYEIHHVNKLKNLKGKKAWEIIMIAKRRKTLVVCKKCHIAIHNQ

SEQ ID NO: 2160 - protein, 1242 aa, unidentified
  source 1..1242: note = uncultivated organism;MG176-2 retrotransposition protein
MANRPAVRTTSPCSTEELNAGIHAAAPPKRVRQSDDATCSQEGLDADVNLVHQGRSDLWKDSEAEELRELVGLNTNSKGLISWVRVLEAWKSKGLCERTKGSLMAKWQGLKNKAARELVLDDTNVAQRGTGKSSPVRGTLDSSVSVVLDTRTPNTVVQAVNKGNGNTRPQDHCDDTAAAPIDPKLKEDIRTVFKEKLKLSKRLGCKPNLRKSPARVTGKVSRSLISEVDNLIDGELGSKTGRKLSWRWLSIVVYAAALTVSEIEGRQRIERSQKTKEWFKNSYKEVERLRSIIGKSTAELNRRSSGIDPTSKQNSNIAMLRKRYGVETFADITSLVGKLKERLKLLRSRIALRKEDQRRQRVRITPAKVLFRSKSDPSGGGDKLNIEDVRKYWKGIVGRAKSFDCRNEDLVAWSATLEGVKTEEDFGDSLSQDLWGEATKKARSWKAHGPDGLQGYWWKAFRSANAALYHLARRHLTSGDALPEKWISEGRIILLYKSGSKEDPSNYRPIACLNTCYKLLTSYITLFVDRHVRSNNILPREQVALQKRSWGCTHALMLDQTLVSDAQYQKQRPISLAWIDYAKAFDSVPHAYIKWLLKVVKLPKTLRTFVNRLLGSWQVKYEARDSSGRTHRSNILEIKSGVLQGDSFSPLLFCLAMAPISHALNSTLIGYQTATGKTQRLQLKLSHLFYMDDLKLYADSSENLSILIKKVETTSTAISMKMNTKKCAKAHFTPRRMRDEDEDDGPNSSGTDGNIPTLEGSSTYKYLGIEQTFGVQETDTWDRVEEKCSAVVQQIWESDLTFRQKVNSYNTKVIPALRYVVLNAVKGSGKYQGVLLRGEQFDKKIRRLLVENKVRYKASCVARLYLTAGLGGYGLKSVKDSVMEATIYSWAYLCTRNDLRSSLNLFSSMSKRGKRSVISDAEYVLKSYRITAELTPNEATVKVSGVKFTDARELARHVISVIRTENDTTRRKEWEVKELSGRVLRSDSLDMQASFVWLQAGKLSSTTVRNVIAAQEGCLLTRAHPSCIEADKLCRACNKSLETIEHVLAGCSKWLTTLYIDRHDSVARNLHYRICEKYELKPPHYSQRVESIMENDRVKVYWGQPVQTKSIIRHNKPDIVIFEKATRKCTIIEFAVSWFTGITRQVDIKTNRYCVNGNWEEDLQLPYPRGDNLLRELQTEGWKVEFLPVVIGTCGEVLGGLAGQISEKLSISTDKAGDCVERMERSAVLGTSRIIKNHLGLR

SEQ ID NO: 2161 - RNA, 485 nt, synthetic construct
  source 1..485: mol_type = other RNA; note = MG140-74 5' UTR
tgcgttgaaggcaggcaagtggatagctctatagactactgctaaagattgctgagagtcgagctaaagtttggcataacaggtcagcattacagctagaaaggccagccaacttttaccatcttaactgactcattgctgagagtcgagctaaagtttggcataaaaggtcagcattacagctagaaaggccagccaacttttaccatcttaactcactcattccacttccactcttcgtaaatttcctctcaactgaccggaccttctcgtggttgcggaggttattagctggtacgtttaagcctttttccatccttgtgtagttccgttaggaactattcgtatcagtgaagctaacaggtcagtgctttagcattgtgaccagattttgaatcgatatattttaaagccttgtctctataaggctactggtcaccacttttttttgtttagttttcaacttggcgttttgtttttccgcg

SEQ ID NO: 2162 - RNA, 146 nt, synthetic construct
  source 1..146: mol_type = other RNA; note = MG140-74 3' UTR
ttccttgttggaaacgattataacgtcggccggttttcgggccaaatgctggagttcttttatcatttattcttttatctttttttgttactttattttttttcttttcttccttttcttaatgagtttgaacaaaggtaaataaa

SEQ ID NO: 2163 - RNA, 985 nt, synthetic construct
  source 1..985: mol_type = other RNA; note = MG140-88 5' UTR
ttcttcgcgccactcgcggcgtacgcacgcgtcggcacgcgctccgcagttttccgcgtttcttcgcggaaattcacgacgcagcgctctcaactacgcaacatcctgtagtgcttccgaccgcgcacccggcacacctaatctccgggcccacccgcgccgcgccagctaattacggcgtctttttagcttcccacgtgctcctaacccccaaatctccaacaataacaaacactaaatccagggcctcactcagtgcgcatttaccttaaatttcggccaccgtccagtgccgcatcaacgagaattggacttagccaattttcgtgcgcgctggacttagaaaattttcggtttgggaacttagaatatttttgggtgctgggacttaggaaattttcgagtctctggacttagaagattttcgacgtttcggcacttagaatattccgggttcctggacttagccgttttcgcggccgcgccgtgccctggatatccccagccgctcccgtcttcctggagcctcccagctcacccccataacccccaccccccaccaaccaccccccacccccccccaccacccccaccccccaaccaccccccacccccaccctcgtgggaagcttatcgcgagaaggtcatctgaaggtcaccaaccaaaatctcgtggtggcctctactcgacccgcctaacaacccccgcgggtccaaaaccttatcgcgcttgaatcctgggaggtcaaaatttctttggcttctcacgctgccgtccgaggtgatacggagtccggatcaacaaggctggtacattccaccgcgccccatcctctggcggtcttggatcgcccgagagacgcagtccagccatccctggcgcctccaccatcaccgggccatataccaccagcaagcccggcgcctccacttcagtcacttcggccattattagagagtccatccggctagtagctgtgacaat

SEQ ID NO: 2164 - RNA, 115 nt, synthetic construct
  source 1..115: mol_type = other RNA; note = MG140-88 3' UTR
attttctaacattacgctgcgcattctgtatttgtctttatatttattactatatgtatcacagttttttaacaaccgccatcagttgtacaagtcttgaataaataagatttta

SEQ ID NO: 2165 - protein, 1120 aa, synthetic construct
  source 1..1120: note = MG140-3_D489A
MSHSTAAASSGAATGPIVIRYPVNTTNGGTTGEQACFFAESSNCGLAFVDNKSFVDHLLRAHKATRDQIQYICSHCHRQFEKIESVRSHHNICKRKEAVAPDLDARLPVECEVDGCSRRFTTTSGMRLHVKKAHPIEYHASIPQSKRNLWSEGEMRMLARMELDNPGLTNARMNELLHSLHPSRSVDVIRHMRGRNTRYREIMEELVLIGVPEDSDSQAEKTAEPEPEGRINECQLEELVKTHSQIDDARYQASIEYVRRVLRSDDPGEFFNDWLFSCFPGKEGRRIQRRKRERLPPRNAKQKRAAEFRVLQELWRKDRSRLATVILDKMPPTAKEPPIGDIEKVYTTRFERPSPEDQHEFTSKPIEEPMEMVRFITVEEVLKNLKAMKSNNAPGLDSNITMKRLRSLPLPCLQLVFNCWLAIGKAPQSMKQCRSKLLPKGAEGLDDVNNWRPLTIGSLLIRLYTRILAMRLQSKVQLHPRQKAFQPLAGCGENIAIVSSLLQDAHERKKELNIIFLDIAKAFDCVSHHSIQRALNRFGLPRAFRRVIEDLYDGATTVFQTSEGDSKTLGISSGVKQGCPLSPVLFNMVMDELIADAPSTEWGYELHDESVGLLAFADDIALVSHSRAMMSHALDYAAGFFEKRNLQLNARKCIGLSIKKAPRRKVMRIEMGSIWSLRNGSDNIPIKMLSPADMARYLGALFSPSGKQTIDLATMKGWITSIEKSRLKPHQKLVMLRTYLLPRVLHHLTIGEPNATTLRRVERELRNSVKRFLKLPVATATPFFHISTKEGGLELPPLLETIAKRKLKWEIRLQKSKDSLIRAVADSPKFRKQFDKARAWIGVPVINRPSDINRRIRELNNGRFERFTSELAVQSRCHRALASNPLRNDWLTGHNPGLYASQFIDALKLVTSQLPTREALNRGNPQADKRCRGCGFSVENQKHVISNCPLVQQERHLRHNRVAQLFARYAKEKGWNIIAEPRIRNPSGEIMRPDIVLRRDDNVAIVDIQIPYEDGGREQLAERYRQKCSKYRQLSTHIQHVLGVTNHTIGAIIVGACGTWCELNNPILDYIGVNTTAIKKNLSIEALRGTLKIFGQFKNRVFRNERVHPSQRPSSGPPVP

SEQ ID NO: 2166 - protein, 1120 aa, synthetic construct
  source 1..1120: note = MG140-3_F702A
MSHSTAAASSGAATGPIVIRYPVNTTNGGTTGEQACFFAESSNCGLAFVDNKSFVDHLLRAHKATRDQIQYICSHCHRQFEKIESVRSHHNICKRKEAVAPDLDARLPVECEVDGCSRRFTTTSGMRLHVKKAHPIEYHASIPQSKRNLWSEGEMRMLARMELDNPGLTNARMNELLHSLHPSRSVDVIRHMRGRNTRYREIMEELVLIGVPEDSDSQAEKTAEPEPEGRINECQLEELVKTHSQIDDARYQASIEYVRRVLRSDDPGEFFNDWLFSCFPGKEGRRIQRRKRERLPPRNAKQKRAAEFRVLQELWRKDRSRLATVILDKMPPTAKEPPIGDIEKVYTTRFERPSPEDQHEFTSKPIEEPMEMVRFITVEEVLKNLKAMKSNNAPGLDSNITMKRLRSLPLPCLQLVFNCWLAIGKAPQSMKQCRSKLLPKGAEGLDDVNNWRPLTIGSLLIRLYTRILAMRLQSKVQLHPRQKAFQPLDGCGENIAIVSSLLQDAHERKKELNIIFLDIAKAFDCVSHHSIQRALNRFGLPRAFRRVIEDLYDGATTVFQTSEGDSKTLGISSGVKQGCPLSPVLFNMVMDELIADAPSTEWGYELHDESVGLLAFADDIALVSHSRAMMSHALDYAAGFFEKRNLQLNARKCIGLSIKKAPRRKVMRIEMGSIWSLRNGSDNIPIKMLSPADMARYLGALASPSGKQTIDLATMKGWITSIEKSRLKPHQKLVMLRTYLLPRVLHHLTIGEPNATTLRRVERELRNSVKRFLKLPVATATPFFHISTKEGGLELPPLLETIAKRKLKWEIRLQKSKDSLIRAVADSPKFRKQFDKARAWIGVPVINRPSDINRRIRELNNGRFERFTSELAVQSRCHRALASNPLRNDWLTGHNPGLYASQFIDALKLVTSQLPTREALNRGNPQADKRCRGCGFSVENQKHVISNCPLVQQERHLRHNRVAQLFARYAKEKGWNIIAEPRIRNPSGEIMRPDIVLRRDDNVAIVDIQIPYEDGGREQLAERYRQKCSKYRQLSTHIQHVLGVTNHTIGAIIVGACGTWCELNNPILDYIGVNTTAIKKNLSIEALRGTLKIFGQFKNRVFRNERVHPSQRPSSGPPVP

SEQ ID NO: 2167 - protein, 1120 aa, synthetic construct
  source 1..1120: note = MG140-3_L698A
MSHSTAAASSGAATGPIVIRYPVNTTNGGTTGEQACFFAESSNCGLAFVDNKSFVDHLLRAHKATRDQIQYICSHCHRQFEKIESVRSHHNICKRKEAVAPDLDARLPVECEVDGCSRRFTTTSGMRLHVKKAHPIEYHASIPQSKRNLWSEGEMRMLARMELDNPGLTNARMNELLHSLHPSRSVDVIRHMRGRNTRYREIMEELVLIGVPEDSDSQAEKTAEPEPEGRINECQLEELVKTHSQIDDARYQASIEYVRRVLRSDDPGEFFNDWLFSCFPGKEGRRIQRRKRERLPPRNAKQKRAAEFRVLQELWRKDRSRLATVILDKMPPTAKEPPIGDIEKVYTTRFERPSPEDQHEFTSKPIEEPMEMVRFITVEEVLKNLKAMKSNNAPGLDSNITMKRLRSLPLPCLQLVFNCWLAIGKAPQSMKQCRSKLLPKGAEGLDDVNNWRPLTIGSLLIRLYTRILAMRLQSKVQLHPRQKAFQPLDGCGENIAIVSSLLQDAHERKKELNIIFLDIAKAFDCVSHHSIQRALNRFGLPRAFRRVIEDLYDGATTVFQTSEGDSKTLGISSGVKQGCPLSPVLFNMVMDELIADAPSTEWGYELHDESVGLLAFADDIALVSHSRAMMSHALDYAAGFFEKRNLQLNARKCIGLSIKKAPRRKVMRIEMGSIWSLRNGSDNIPIKMLSPADMARYAGALFSPSGKQTIDLATMKGWITSIEKSRLKPHQKLVMLRTYLLPRVLHHLTIGEPNATTLRRVERELRNSVKRFLKLPVATATPFFHISTKEGGLELPPLLETIAKRKLKWEIRLQKSKDSLIRAVADSPKFRKQFDKARAWIGVPVINRPSDINRRIRELNNGRFERFTSELAVQSRCHRALASNPLRNDWLTGHNPGLYASQFIDALKLVTSQLPTREALNRGNPQADKRCRGCGFSVENQKHVISNCPLVQQERHLRHNRVAQLFARYAKEKGWNIIAEPRIRNPSGEIMRPDIVLRRDDNVAIVDIQIPYEDGGREQLAERYRQKCSKYRQLSTHIQHVLGVTNHTIGAIIVGACGTWCELNNPILDYIGVNTTAIKKNLSIEALRGTLKIFGQFKNRVFRNERVHPSQRPSSGPPVP

SEQ ID NO: 2168 - protein, 1120 aa, synthetic construct
  source 1..1120: note = MG140-3_L748A
MSHSTAAASSGAATGPIVIRYPVNTTNGGTTGEQACFFAESSNCGLAFVDNKSFVDHLLRAHKATRDQIQYICSHCHRQFEKIESVRSHHNICKRKEAVAPDLDARLPVECEVDGCSRRFTTTSGMRLHVKKAHPIEYHASIPQSKRNLWSEGEMRMLARMELDNPGLTNARMNELLHSLHPSRSVDVIRHMRGRNTRYREIMEELVLIGVPEDSDSQAEKTAEPEPEGRINECQLEELVKTHSQIDDARYQASIEYVRRVLRSDDPGEFFNDWLFSCFPGKEGRRIQRRKRERLPPRNAKQKRAAEFRVLQELWRKDRSRLATVILDKMPPTAKEPPIGDIEKVYTTRFERPSPEDQHEFTSKPIEEPMEMVRFITVEEVLKNLKAMKSNNAPGLDSNITMKRLRSLPLPCLQLVFNCWLAIGKAPQSMKQCRSKLLPKGAEGLDDVNNWRPLTIGSLLIRLYTRILAMRLQSKVQLHPRQKAFQPLDGCGENIAIVSSLLQDAHERKKELNIIFLDIAKAFDCVSHHSIQRALNRFGLPRAFRRVIEDLYDGATTVFQTSEGDSKTLGISSGVKQGCPLSPVLFNMVMDELIADAPSTEWGYELHDESVGLLAFADDIALVSHSRAMMSHALDYAAGFFEKRNLQLNARKCIGLSIKKAPRRKVMRIEMGSIWSLRNGSDNIPIKMLSPADMARYLGALFSPSGKQTIDLATMKGWITSIEKSRLKPHQKLVMLRTYLLPRVLHHATIGEPNATTLRRVERELRNSVKRFLKLPVATATPFFHISTKEGGLELPPLLETIAKRKLKWEIRLQKSKDSLIRAVADSPKFRKQFDKARAWIGVPVINRPSDINRRIRELNNGRFERFTSELAVQSRCHRALASNPLRNDWLTGHNPGLYASQFIDALKLVTSQLPTREALNRGNPQADKRCRGCGFSVENQKHVISNCPLVQQERHLRHNRVAQLFARYAKEKGWNIIAEPRIRNPSGEIMRPDIVLRRDDNVAIVDIQIPYEDGGREQLAERYRQKCSKYRQLSTHIQHVLGVTNHTIGAIIVGACGTWCELNNPILDYIGVNTTAIKKNLSIEALRGTLKIFGQFKNRVFRNERVHPSQRPSSGPPVP

SEQ ID NO: 2169 - protein, 1120 aa, synthetic construct
  source 1..1120: note = MG140-3_L765A
MSHSTAAASSGAATGPIVIRYPVNTTNGGTTGEQACFFAESSNCGLAFVDNKSFVDHLLRAHKATRDQIQYICSHCHRQFEKIESVRSHHNICKRKEAVAPDLDARLPVECEVDGCSRRFTTTSGMRLHVKKAHPIEYHASIPQSKRNLWSEGEMRMLARMELDNPGLTNARMNELLHSLHPSRSVDVIRHMRGRNTRYREIMEELVLIGVPEDSDSQAEKTAEPEPEGRINECQLEELVKTHSQIDDARYQASIEYVRRVLRSDDPGEFFNDWLFSCFPGKEGRRIQRRKRERLPPRNAKQKRAAEFRVLQELWRKDRSRLATVILDKMPPTAKEPPIGDIEKVYTTRFERPSPEDQHEFTSKPIEEPMEMVRFITVEEVLKNLKAMKSNNAPGLDSNITMKRLRSLPLPCLQLVFNCWLAIGKAPQSMKQCRSKLLPKGAEGLDDVNNWRPLTIGSLLIRLYTRILAMRLQSKVQLHPRQKAFQPLDGCGENIAIVSSLLQDAHERKKELNIIFLDIAKAFDCVSHHSIQRALNRFGLPRAFRRVIEDLYDGATTVFQTSEGDSKTLGISSGVKQGCPLSPVLFNMVMDELIADAPSTEWGYELHDESVGLLAFADDIALVSHSRAMMSHALDYAAGFFEKRNLQLNARKCIGLSIKKAPRRKVMRIEMGSIWSLRNGSDNIPIKMLSPADMARYLGALFSPSGKQTIDLATMKGWITSIEKSRLKPHQKLVMLRTYLLPRVLHHLTIGEPNATTLRRVEREARNSVKRFLKLPVATATPFFHISTKEGGLELPPLLETIAKRKLKWEIRLQKSKDSLIRAVADSPKFRKQFDKARAWIGVPVINRPSDINRRIRELNNGRFERFTSELAVQSRCHRALASNPLRNDWLTGHNPGLYASQFIDALKLVTSQLPTREALNRGNPQADKRCRGCGFSVENQKHVISNCPLVQQERHLRHNRVAQLFARYAKEKGWNIIAEPRIRNPSGEIMRPDIVLRRDDNVAIVDIQIPYEDGGREQLAERYRQKCSKYRQLSTHIQHVLGVTNHTIGAIIVGACGTWCELNNPILDYIGVNTTAIKKNLSIEALRGTLKIFGQFKNRVFRNERVHPSQRPSSGPPVP

SEQ ID NO: 2170 - protein, 1056 aa, synthetic construct
  source 1..1056: note = MG140-8_D451A
MYPTSAEVPQPCPVCLSSLIDPKQIRDHFRKKHHGVLMHWTCRKCGRFWPNNKSAASHYRYCIKSLPSLEGPSKSHKCIECGGSFSTLAGLQLHRKRKHPEAYNESLPRPTGKNRPWGDDELKRLAAVELDSGGTKHINIKCQKHLPHRTIEAIASIRKTDRYRIILREIRSSRSISRETREEATTSTPDSSNVLERLTSRIAELKSGDYSPSVEAILAYTERCLEDRNASSGLSLLPSEMYMPKPTSASKINRGMRTPFRPQNRTQRRRQHYQQVQLLYKRDRKQAAGVILDGSPLHVVQPDVEKVDEIFRSRFSRPSPPDDAEFISSPAGVLNMDYITAGEIQQCRDSMKKNNAPGPDRNITMDVLLALELPVLELLFNTWLALKQVPAAFKTARTILIPKSGDTSDPNNWRPITICSLISRLYAKLLASRLSKCANLSERQKAFRPVAGCGENTAILSAVIAQARKTKSQLHVVFLDLAKAFDTIPHTSIVRALKRKALPGHFIDVVENLYTEATTSISVGGKNTSSMPLTSGVKQGCPLSPILFNLVLDELITLIGDDNGVDLNDKKIAILAFADDLVLLSPTTDGMETNLKLCEGFFDKRSMKLNARKSVSLSIVRAHKRKTMLTDERPKWKVHGEFLPTIKHTEEIKYLGVRYSAAGRSIAKFPKLDQWLQRLKKAPLKPQQRIQMVRSTITSRLIHTLRLSRVHAKLLKDLDRKIRSFVKSVLHLPSGTSTDFFYIPVLKGGLGLQEFMTLIPAAKLKLINSMKKSSDQAVIAAMEVDHWLREERWCRKVTLNQGNKNDAERRRLARYINSPRGKSQVGFANLPGQCRWLEGGAKLTGHEYIVGCHLMSNTLPVRTRTFHGGRDRVVTCRYCPGVLETPSHALQSCPVVRNAVTKRHDLILTKLQHFLTPNYDSVIREPWFNGREGRMNPDLVLKQGKMVYVVDLTIPYDSSPEFIDSQAQRKVAKYDTLKPLLQQKFQAERVEVIGLALGARGMYTSAGIQTCLKLGLSDRQRRYMGMMALRLTCAVWGIFRSQPSGLFNKVPDTGTT

SEQ ID NO: 2171 - protein, 1056 aa, synthetic construct
  source 1..1056: note = MG140-8_I722A
MYPTSAEVPQPCPVCLSSLIDPKQIRDHFRKKHHGVLMHWTCRKCGRFWPNNKSAASHYRYCIKSLPSLEGPSKSHKCIECGGSFSTLAGLQLHRKRKHPEAYNESLPRPTGKNRPWGDDELKRLAAVELDSGGTKHINIKCQKHLPHRTIEAIASIRKTDRYRIILREIRSSRSISRETREEATTSTPDSSNVLERLTSRIAELKSGDYSPSVEAILAYTERCLEDRNASSGLSLLPSEMYMPKPTSASKINRGMRTPFRPQNRTQRRRQHYQQVQLLYKRDRKQAAGVILDGSPLHVVQPDVEKVDEIFRSRFSRPSPPDDAEFISSPAGVLNMDYITAGEIQQCRDSMKKNNAPGPDRNITMDVLLALELPVLELLFNTWLALKQVPAAFKTARTILIPKSGDTSDPNNWRPITICSLISRLYAKLLASRLSKCANLSERQKAFRPVDGCGENTAILSAVIAQARKTKSQLHVVFLDLAKAFDTIPHTSIVRALKRKALPGHFIDVVENLYTEATTSISVGGKNTSSMPLTSGVKQGCPLSPILFNLVLDELITLIGDDNGVDLNDKKIAILAFADDLVLLSPTTDGMETNLKLCEGFFDKRSMKLNARKSVSLSIVRAHKRKTMLTDERPKWKVHGEFLPTIKHTEEIKYLGVRYSAAGRSIAKFPKLDQWLQRLKKAPLKPQQRIQMVRSTITSRLIHTLRLSRVHAKLLKDLDRKARSFVKSVLHLPSGTSTDFFYIPVLKGGLGLQEFMTLIPAAKLKLINSMKKSSDQAVIAAMEVDHWLREERWCRKVTLNQGNKNDAERRRLARYINSPRGKSQVGFANLPGQCRWLEGGAKLTGHEYIVGCHLMSNTLPVRTRTFHGGRDRVVTCRYCPGVLETPSHALQSCPVVRNAVTKRHDLILTKLQHFLTPNYDSVIREPWFNGREGRMNPDLVLKQGKMVYVVDLTIPYDSSPEFIDSQAQRKVAKYDTLKPLLQQKFQAERVEVIGLALGARGMYTSAGIQTCLKLGLSDRQRRYMGMMALRLTCAVWGIFRSQPSGLFNKVPDTGTT

SEQ ID NO: 2172 - protein, 1056 aa, synthetic construct
  source 1..1056: note = MG140-8_L655A
MYPTSAEVPQPCPVCLSSLIDPKQIRDHFRKKHHGVLMHWTCRKCGRFWPNNKSAASHYRYCIKSLPSLEGPSKSHKCIECGGSFSTLAGLQLHRKRKHPEAYNESLPRPTGKNRPWGDDELKRLAAVELDSGGTKHINIKCQKHLPHRTIEAIASIRKTDRYRIILREIRSSRSISRETREEATTSTPDSSNVLERLTSRIAELKSGDYSPSVEAILAYTERCLEDRNASSGLSLLPSEMYMPKPTSASKINRGMRTPFRPQNRTQRRRQHYQQVQLLYKRDRKQAAGVILDGSPLHVVQPDVEKVDEIFRSRFSRPSPPDDAEFISSPAGVLNMDYITAGEIQQCRDSMKKNNAPGPDRNITMDVLLALELPVLELLFNTWLALKQVPAAFKTARTILIPKSGDTSDPNNWRPITICSLISRLYAKLLASRLSKCANLSERQKAFRPVDGCGENTAILSAVIAQARKTKSQLHVVFLDLAKAFDTIPHTSIVRALKRKALPGHFIDVVENLYTEATTSISVGGKNTSSMPLTSGVKQGCPLSPILFNLVLDELITLIGDDNGVDLNDKKIAILAFADDLVLLSPTTDGMETNLKLCEGFFDKRSMKLNARKSVSLSIVRAHKRKTMLTDERPKWKVHGEFLPTIKHTEEIKYAGVRYSAAGRSIAKFPKLDQWLQRLKKAPLKPQQRIQMVRSTITSRLIHTLRLSRVHAKLLKDLDRKIRSFVKSVLHLPSGTSTDFFYIPVLKGGLGLQEFMTLIPAAKLKLINSMKKSSDQAVIAAMEVDHWLREERWCRKVTLNQGNKNDAERRRLARYINSPRGKSQVGFANLPGQCRWLEGGAKLTGHEYIVGCHLMSNTLPVRTRTFHGGRDRVVTCRYCPGVLETPSHALQSCPVVRNAVTKRHDLILTKLQHFLTPNYDSVIREPWFNGREGRMNPDLVLKQGKMVYVVDLTIPYDSSPEFIDSQAQRKVAKYDTLKPLLQQKFQAERVEVIGLALGARGMYTSAGIQTCLKLGLSDRQRRYMGMMALRLTCAVWGIFRSQPSGLFNKVPDTGTT

SEQ ID NO: 2173 - protein, 1056 aa, synthetic construct
  source 1..1056: note = MG140-8_L705A
MYPTSAEVPQPCPVCLSSLIDPKQIRDHFRKKHHGVLMHWTCRKCGRFWPNNKSAASHYRYCIKSLPSLEGPSKSHKCIECGGSFSTLAGLQLHRKRKHPEAYNESLPRPTGKNRPWGDDELKRLAAVELDSGGTKHINIKCQKHLPHRTIEAIASIRKTDRYRIILREIRSSRSISRETREEATTSTPDSSNVLERLTSRIAELKSGDYSPSVEAILAYTERCLEDRNASSGLSLLPSEMYMPKPTSASKINRGMRTPFRPQNRTQRRRQHYQQVQLLYKRDRKQAAGVILDGSPLHVVQPDVEKVDEIFRSRFSRPSPPDDAEFISSPAGVLNMDYITAGEIQQCRDSMKKNNAPGPDRNITMDVLLALELPVLELLFNTWLALKQVPAAFKTARTILIPKSGDTSDPNNWRPITICSLISRLYAKLLASRLSKCANLSERQKAFRPVDGCGENTAILSAVIAQARKTKSQLHVVFLDLAKAFDTIPHTSIVRALKRKALPGHFIDVVENLYTEATTSISVGGKNTSSMPLTSGVKQGCPLSPILFNLVLDELITLIGDDNGVDLNDKKIAILAFADDLVLLSPTTDGMETNLKLCEGFFDKRSMKLNARKSVSLSIVRAHKRKTMLTDERPKWKVHGEFLPTIKHTEEIKYLGVRYSAAGRSIAKFPKLDQWLQRLKKAPLKPQQRIQMVRSTITSRLIHTARLSRVHAKLLKDLDRKIRSFVKSVLHLPSGTSTDFFYIPVLKGGLGLQEFMTLIPAAKLKLINSMKKSSDQAVIAAMEVDHWLREERWCRKVTLNQGNKNDAERRRLARYINSPRGKSQVGFANLPGQCRWLEGGAKLTGHEYIVGCHLMSNTLPVRTRTFHGGRDRVVTCRYCPGVLETPSHALQSCPVVRNAVTKRHDLILTKLQHFLTPNYDSVIREPWFNGREGRMNPDLVLKQGKMVYVVDLTIPYDSSPEFIDSQAQRKVAKYDTLKPLLQQKFQAERVEVIGLALGARGMYTSAGIQTCLKLGLSDRQRRYMGMMALRLTCAVWGIFRSQPSGLFNKVPDTGTT

SEQ ID NO: 2174 - protein, 1246 aa, synthetic construct
  source 1..1246: note = MG140-88_W540A
MGDRVKTAQDAGSKTSSCQRDAPPANAQFVCVSCNSRFDRKSSLSLHSKSCGNTRTKCNYCTVSLTTYKLIRQHERRHHNAEYMRDLEAEKPTPDSAYFAKLAAMEAAAKGGVVSIAAMVTATGLTTHQIRTKRSKPVYQKYLEMAKRDQVAKSKLLFGATSSATSPSTSTSVTNATTTASPPSRAVTVSRQHSADGTAPRKNASSSYTRGPCPKASTSASPPGPPPPSVARIETQTDDGKRRRLSSPTVPAGVPTSERKKKRLQGSPLRPTTSRLLPNTTSASATGLPADTPQENASPGPDPPPAAPNKPADRPPAPLGDESALQQPEAPITSCKRLRSPSLSPAMPLAPALRRTSATVTPLRTRLPHAPPPRLNRDSAMASEFRLALEAVLEAEEPCPGIHRLVTSALSDNNSMFQARLDEFWAATWPTTTSRERRRPPRPSGYGSVHHGKGTRAAEYKKAQELFGKDKRGLANTILEGRPILTPPEVPSIQQVEDVFAAIWEADVADGPIAATSPHIPVPSMPPIFEADVQLAREHAMKSAPGPDGITVAQVCRMNPRVLATVFNILLLRAAVPSSWRVLRTVLIHKGGSRTDPNNWRPLTIASTLQRLFHRVLLRHLTSHTTLHPSQRGFRSVDGTFANAVILDAYIKSRTGQGKAWNIVGIDLSKAFDSVSHNAISKALALAGVDERLATYIITSLTGCATQLDLGGKKSRPINIQRGVKQGDPLSPLLFNLVLDPILQHISTCFKGGTIPGGDKVPVIAFADDLFLLADDDLEIPLMLHMLEEYLTQQGLRINARKCVSISAATIAGKSVVRSKSHYRISESLIPCVGNMNSFKYMGHQFSEKGMMPYNLGNLRTWLERVLKAPLKPHQKMCLLKDHVIPKVLHGLSSPATTGDKLREADRLIRRFVKRALHLQIHTANHLIHARIRDGGLGVLELRKTIPEVSLRRCRGIANATSDPVLASFTSSDHFLKLVNKLEKLAGTVPSTEANRSLIITSPSSSGLEAAADDPASRQWLQSLPQGWTGRDFVRAVHLRTGNLPTRDHHSNPPELRKCRDGCEENESLRHILQLCPRVQAHRIRRHNEIASKVANAMRRKWTVEWEPHVKHEDRKLYKPDMAIHLPDQLVIVDVQVAWEWKENSLAVAWDAKRNKYTTPHFMEAAARRWPGRRVTTLPVILGARGIWPSCNRTTVNTLNLSSALRRSCVESCLKWGSTIHKQFMASVFSQSTRSRPQGLSSRDAG

SEQ ID NO: 2175 - protein, 1035 aa, synthetic construct
  source 1..1035: note = MG140-74_D920A
MFACGQCERTFGNKGALGNHCKWKHAQTRLPERTNGGEFPCPDCDNAYGSSGGLNVHRRARHPDVYHAARQPAARVKARWSYEELVLVARAELEIRGTNPPQGVVRVLHSRFPDRTFEAIKCLRNKNPRYKEVLAALEVEEVDEGLPTVTPSEQTHAFAQADGLWRDQLRMAINIEHLGVDDLDWVADGCPAEDIRKKLDELFASWVGHLVRGERAPARSHQPAAGVTNPSRELDPRRRRRAQYSAIQHLYGRKPSAAAHKVLDGSWECGDPVPTPTLEDFRMAWQPIFETPSIKDNRRPTCVGQVRWEIVSPVTPGELEKVLTEGASSAPGPDGVKLKDVIGLGIGELCSHFNLWLLCGSQPSAMCVGRTIYIPKGSESNDALKYRPITIASHILRVFHKIMARRFDAFLPLKYTQKGFRSGDGIAQHVLSLQAIIDGAKRQRKPVNLVFLDVRKAFDSVSHDTIVLAMRRLGCPDPFLSYIRDLYSRSSTVIEHNGERSAPIFTRRGVKQGDPLSPFMFNAVIDWAFSSLDDHVGFSFGHVRVNNLGYADDVALLSDTRAGLRSQLGKFESHLAKGGLTISAGTEGKSSSLSIVVDGKAKRWVVDQTPFLATNEGIIPSLSASGEYRYLGIMLGSGGAKVRSSLREELLQGLQNITRAPLKPYQRMRILRNFLLPKYLHELVLAPVADGWLNWLDTAIRANVRQWLKLPQDTPVAFIHAGTGDGGLSVPSLRYSVPVMRRKRLEAVHSATDPLSTALTASPFFQKELSGLSRKTLGGRLVTDKQSLAQAWAGCLYTKVDGRGLSEARSCAEGSRWVSNPPRNQSGANYIGAIKARGGLLYSKVRSARGDSGRDVRCDSCMRPETAQHIIQVCPRTSGPRMRRHDRVVQFVSAAAERAGYKVLVEPRIVGRTLGVRKPALVLWNESRAYVADVTITSDQVGGVKAHRDKVAYYDQPEIREWVERFTGLSHISFSAVAANWRGVLSPLSADFLKSVLKLSNWDISLLGLRICEETYHIHRYFGRSTYRVRGRGPS

SEQ ID NO: 2176 - protein, 852 aa, synthetic construct
  source 1..852: note = MG140-74_C5_Trim
MFACGQCERTFGNKGALGNHCKWKHAQTRLPERTNGGEFPCPDCDNAYGSSGGLNVHRRARHPDVYHAARQPAARVKARWSYEELVLVARAELEIRGTNPPQGVVRVLHSRFPDRTFEAIKCLRNKNPRYKEVLAALEVEEVDEGLPTVTPSEQTHAFAQADGLWRDQLRMAINIEHLGVDDLDWVADGCPAEDIRKKLDELFASWVGHLVRGERAPARSHQPAAGVTNPSRELDPRRRRRAQYSAIQHLYGRKPSAAAHKVLDGSWECGDPVPTPTLEDFRMAWQPIFETPSIKDNRRPTCVGQVRWEIVSPVTPGELEKVLTEGASSAPGPDGVKLKDVIGLGIGELCSHFNLWLLCGSQPSAMCVGRTIYIPKGSESNDALKYRPITIASHILRVFHKIMARRFDAFLPLKYTQKGFRSGDGIAQHVLSLQAIIDGAKRQRKPVNLVFLDVRKAFDSVSHDTIVLAMRRLGCPDPFLSYIRDLYSRSSTVIEHNGERSAPIFTRRGVKQGDPLSPFMFNAVIDWAFSSLDDHVGFSFGHVRVNNLGYADDVALLSDTRAGLRSQLGKFESHLAKGGLTISAGTEGKSSSLSIVVDGKAKRWVVDQTPFLATNEGIIPSLSASGEYRYLGIMLGSGGAKVRSSLREELLQGLQNITRAPLKPYQRMRILRNFLLPKYLHELVLAPVADGWLNWLDTAIRANVRQWLKLPQDTPVAFIHAGTGDGGLSVPSLRYSVPVMRRKRLEAVHSATDPLSTALTASPFFQKELSGLSRKTLGGRLVTDKQSLAQAWAGCLYTKVDGRGLSEARSCAEGSRWVSNPPRNQSGANYIGAIKARGGLLYSKVRSARGDS

SEQ ID NO: 2177 - protein, 1052 aa, synthetic construct
  source 1..1052: note = MG140-88_C5_Trim
MGDRVKTAQDAGSKTSSCQRDAPPANAQFVCVSCNSRFDRKSSLSLHSKSCGNTRTKCNYCTVSLTTYKLIRQHERRHHNAEYMRDLEAEKPTPDSAYFAKLAAMEAAAKGGVVSIAAMVTATGLTTHQIRTKRSKPVYQKYLEMAKRDQVAKSKLLFGATSSATSPSTSTSVTNATTTASPPSRAVTVSRQHSADGTAPRKNASSSYTRGPCPKASTSASPPGPPPPSVARIETQTDDGKRRRLSSPTVPAGVPTSERKKKRLQGSPLRPTTSRLLPNTTSASATGLPADTPQENASPGPDPPPAAPNKPADRPPAPLGDESALQQPEAPITSCKRLRSPSLSPAMPLAPALRRTSATVTPLRTRLPHAPPPRLNRDSAMASEFRLALEAVLEAEEPCPGIHRLVTSALSDNNSMFQARLDEFWAATWPTTTSRERRRPPRPSGYGSVHHGKGTRAAEYKKAQELFGKDKRGLANTILEGRPILTPPEVPSIQQVEDVFAAIWEADVADGPIAATSPHIPVPSMPPIFEADVQLAREHWMKSAPGPDGITVAQVCRMNPRVLATVFNILLLRAAVPSSWRVLRTVLIHKGGSRTDPNNWRPLTIASTLQRLFHRVLLRHLTSHTTLHPSQRGFRSVDGTFANAVILDAYIKSRTGQGKAWNIVGIDLSKAFDSVSHNAISKALALAGVDERLATYIITSLTGCATQLDLGGKKSRPINIQRGVKQGDPLSPLLFNLVLDPILQHISTCFKGGTIPGGDKVPVIAFADDLFLLADDDLEIPLMLHMLEEYLTQQGLRINARKCVSISAATIAGKSVVRSKSHYRISESLIPCVGNMNSFKYMGHQFSEKGMMPYNLGNLRTWLERVLKAPLKPHQKMCLLKDHVIPKVLHGLSSPATTGDKLREADRLIRRFVKRALHLQIHTANHLIHARIRDGGLGVLELRKTIPEVSLRRCRGIANATSDPVLASFTSSDHFLKLVNKLEKLAGTVPSTEANRSLIITSPSSSGLEAAADDPASRQWLQSLPQGWTGRDFVRAVHLRTGNLPTRDHHSN

SEQ ID NO: 2178 - protein, 1246 aa, synthetic construct
  source 1..1246: note = MG140-88_D1121A
MGDRVKTAQDAGSKTSSCQRDAPPANAQFVCVSCNSRFDRKSSLSLHSKSCGNTRTKCNYCTVSLTTYKLIRQHERRHHNAEYMRDLEAEKPTPDSAYFAKLAAMEAAAKGGVVSIAAMVTATGLTTHQIRTKRSKPVYQKYLEMAKRDQVAKSKLLFGATSSATSPSTSTSVTNATTTASPPSRAVTVSRQHSADGTAPRKNASSSYTRGPCPKASTSASPPGPPPPSVARIETQTDDGKRRRLSSPTVPAGVPTSERKKKRLQGSPLRPTTSRLLPNTTSASATGLPADTPQENASPGPDPPPAAPNKPADRPPAPLGDESALQQPEAPITSCKRLRSPSLSPAMPLAPALRRTSATVTPLRTRLPHAPPPRLNRDSAMASEFRLALEAVLEAEEPCPGIHRLVTSALSDNNSMFQARLDEFWAATWPTTTSRERRRPPRPSGYGSVHHGKGTRAAEYKKAQELFGKDKRGLANTILEGRPILTPPEVPSIQQVEDVFAAIWEADVADGPIAATSPHIPVPSMPPIFEADVQLAREHWMKSAPGPDGITVAQVCRMNPRVLATVFNILLLRAAVPSSWRVLRTVLIHKGGSRTDPNNWRPLTIASTLQRLFHRVLLRHLTSHTTLHPSQRGFRSVDGTFANAVILDAYIKSRTGQGKAWNIVGIDLSKAFDSVSHNAISKALALAGVDERLATYIITSLTGCATQLDLGGKKSRPINIQRGVKQGDPLSPLLFNLVLDPILQHISTCFKGGTIPGGDKVPVIAFADDLFLLADDDLEIPLMLHMLEEYLTQQGLRINARKCVSISAATIAGKSVVRSKSHYRISESLIPCVGNMNSFKYMGHQFSEKGMMPYNLGNLRTWLERVLKAPLKPHQKMCLLKDHVIPKVLHGLSSPATTGDKLREADRLIRRFVKRALHLQIHTANHLIHARIRDGGLGVLELRKTIPEVSLRRCRGIANATSDPVLASFTSSDHFLKLVNKLEKLAGTVPSTEANRSLIITSPSSSGLEAAADDPASRQWLQSLPQGWTGRDFVRAVHLRTGNLPTRDHHSNPPELRKCRDGCEENESLRHILQLCPRVQAHRIRRHNEIASKVANAMRRKWTVEWEPHVKHEDRKLYKPAMAIHLPDQLVIVDVQVAWEWKENSLAVAWDAKRNKYTTPHFMEAAARRWPGRRVTTLPVILGARGIWPSCNRTTVNTLNLSSALRRSCVESCLKWGSTIHKQFMASVFSQSTRSRPQGLSSRDAG

SEQ ID NO: 2179 - protein, 813 aa, synthetic construct
  source 1..813: note = MG140-8_N1_Trim
PKPTSASKINRGMRTPFRPQNRTQRRRQHYQQVQLLYKRDRKQAAGVILDGSPLHVVQPDVEKVDEIFRSRFSRPSPPDDAEFISSPAGVLNMDYITAGEIQQCRDSMKKNNAPGPDRNITMDVLLALELPVLELLFNTWLALKQVPAAFKTARTILIPKSGDTSDPNNWRPITICSLISRLYAKLLASRLSKCANLSERQKAFRPVDGCGENTAILSAVIAQARKTKSQLHVVFLDLAKAFDTIPHTSIVRALKRKALPGHFIDVVENLYTEATTSISVGGKNTSSMPLTSGVKQGCPLSPILFNLVLDELITLIGDDNGVDLNDKKIAILAFADDLVLLSPTTDGMETNLKLCEGFFDKRSMKLNARKSVSLSIVRAHKRKTMLTDERPKWKVHGEFLPTIKHTEEIKYLGVRYSAAGRSIAKFPKLDQWLQRLKKAPLKPQQRIQMVRSTITSRLIHTLRLSRVHAKLLKDLDRKIRSFVKSVLHLPSGTSTDFFYIPVLKGGLGLQEFMTLIPAAKLKLINSMKKSSDQAVIAAMEVDHWLREERWCRKVTLNQGNKNDAERRRLARYINSPRGKSQVGFANLPGQCRWLEGGAKLTGHEYIVGCHLMSNTLPVRTRTFHGGRDRVVTCRYCPGVLETPSHALQSCPVVRNAVTKRHDLILTKLQHFLTPNYDSVIREPWFNGREGRMNPDLVLKQGKMVYVVDLTIPYDSSPEFIDSQAQRKVAKYDTLKPLLQQKFQAERVEVIGLALGARGMYTSAGIQTCLKLGLSDRQRRYMGMMALRLTCAVWGIFRSQPSGLFNKVPDTGTT

SEQ ID NO: 2180 - protein, 799 aa, synthetic construct
  source 1..799: note = MG140-8_N2_Trim
TPFRPQNRTQRRRQHYQQVQLLYKRDRKQAAGVILDGSPLHVVQPDVEKVDEIFRSRFSRPSPPDDAEFISSPAGVLNMDYITAGEIQQCRDSMKKNNAPGPDRNITMDVLLALELPVLELLFNTWLALKQVPAAFKTARTILIPKSGDTSDPNNWRPITICSLISRLYAKLLASRLSKCANLSERQKAFRPVDGCGENTAILSAVIAQARKTKSQLHVVFLDLAKAFDTIPHTSIVRALKRKALPGHFIDVVENLYTEATTSISVGGKNTSSMPLTSGVKQGCPLSPILFNLVLDELITLIGDDNGVDLNDKKIAILAFADDLVLLSPTTDGMETNLKLCEGFFDKRSMKLNARKSVSLSIVRAHKRKTMLTDERPKWKVHGEFLPTIKHTEEIKYLGVRYSAAGRSIAKFPKLDQWLQRLKKAPLKPQQRIQMVRSTITSRLIHTLRLSRVHAKLLKDLDRKIRSFVKSVLHLPSGTSTDFFYIPVLKGGLGLQEFMTLIPAAKLKLINSMKKSSDQAVIAAMEVDHWLREERWCRKVTLNQGNKNDAERRRLARYINSPRGKSQVGFANLPGQCRWLEGGAKLTGHEYIVGCHLMSNTLPVRTRTFHGGRDRVVTCRYCPGVLETPSHALQSCPVVRNAVTKRHDLILTKLQHFLTPNYDSVIREPWFNGREGRMNPDLVLKQGKMVYVVDLTIPYDSSPEFIDSQAQRKVAKYDTLKPLLQQKFQAERVEVIGLALGARGMYTSAGIQTCLKLGLSDRQRRYMGMMALRLTCAVWGIFRSQPSGLFNKVPDTGTT

SEQ ID NO: 2181 - protein, 795 aa, synthetic construct
  source 1..795: note = MG140-8_N3_Trim
PQNRTQRRRQHYQQVQLLYKRDRKQAAGVILDGSPLHVVQPDVEKVDEIFRSRFSRPSPPDDAEFISSPAGVLNMDYITAGEIQQCRDSMKKNNAPGPDRNITMDVLLALELPVLELLFNTWLALKQVPAAFKTARTILIPKSGDTSDPNNWRPITICSLISRLYAKLLASRLSKCANLSERQKAFRPVDGCGENTAILSAVIAQARKTKSQLHVVFLDLAKAFDTIPHTSIVRALKRKALPGHFIDVVENLYTEATTSISVGGKNTSSMPLTSGVKQGCPLSPILFNLVLDELITLIGDDNGVDLNDKKIAILAFADDLVLLSPTTDGMETNLKLCEGFFDKRSMKLNARKSVSLSIVRAHKRKTMLTDERPKWKVHGEFLPTIKHTEEIKYLGVRYSAAGRSIAKFPKLDQWLQRLKKAPLKPQQRIQMVRSTITSRLIHTLRLSRVHAKLLKDLDRKIRSFVKSVLHLPSGTSTDFFYIPVLKGGLGLQEFMTLIPAAKLKLINSMKKSSDQAVIAAMEVDHWLREERWCRKVTLNQGNKNDAERRRLARYINSPRGKSQVGFANLPGQCRWLEGGAKLTGHEYIVGCHLMSNTLPVRTRTFHGGRDRVVTCRYCPGVLETPSHALQSCPVVRNAVTKRHDLILTKLQHFLTPNYDSVIREPWFNGREGRMNPDLVLKQGKMVYVVDLTIPYDSSPEFIDSQAQRKVAKYDTLKPLLQQKFQAERVEVIGLALGARGMYTSAGIQTCLKLGLSDRQRRYMGMMALRLTCAVWGIFRSQPSGLFNKVPDTGTT

SEQ ID NO: 2182 - protein, 753 aa, synthetic construct
  source 1..753: note = MG140-8_C4_Trim
MYPTSAEVPQPCPVCLSSLIDPKQIRDHFRKKHHGVLMHWTCRKCGRFWPNNKSAASHYRYCIKSLPSLEGPSKSHKCIECGGSFSTLAGLQLHRKRKHPEAYNESLPRPTGKNRPWGDDELKRLAAVELDSGGTKHINIKCQKHLPHRTIEAIASIRKTDRYRIILREIRSSRSISRETREEATTSTPDSSNVLERLTSRIAELKSGDYSPSVEAILAYTERCLEDRNASSGLSLLPSEMYMPKPTSASKINRGMRTPFRPQNRTQRRRQHYQQVQLLYKRDRKQAAGVILDGSPLHVVQPDVEKVDEIFRSRFSRPSPPDDAEFISSPAGVLNMDYITAGEIQQCRDSMKKNNAPGPDRNITMDVLLALELPVLELLFNTWLALKQVPAAFKTARTILIPKSGDTSDPNNWRPITICSLISRLYAKLLASRLSKCANLSERQKAFRPVDGCGENTAILSAVIAQARKTKSQLHVVFLDLAKAFDTIPHTSIVRALKRKALPGHFIDVVENLYTEATTSISVGGKNTSSMPLTSGVKQGCPLSPILFNLVLDELITLIGDDNGVDLNDKKIAILAFADDLVLLSPTTDGMETNLKLCEGFFDKRSMKLNARKSVSLSIVRAHKRKTMLTDERPKWKVHGEFLPTIKHTEEIKYLGVRYSAAGRSIAKFPKLDQWLQRLKKAPLKPQQRIQMVRSTITSRLIHTLRLSRVHAKLLKDLDRKIRSFVKSVLHLPSGTSTDFFYIPVLKGGLGLQ

SEQ ID NO: 2183 - protein, 869 aa, synthetic construct
  source 1..869: note = MG140-8_C5_Trim
MYPTSAEVPQPCPVCLSSLIDPKQIRDHFRKKHHGVLMHWTCRKCGRFWPNNKSAASHYRYCIKSLPSLEGPSKSHKCIECGGSFSTLAGLQLHRKRKHPEAYNESLPRPTGKNRPWGDDELKRLAAVELDSGGTKHINIKCQKHLPHRTIEAIASIRKTDRYRIILREIRSSRSISRETREEATTSTPDSSNVLERLTSRIAELKSGDYSPSVEAILAYTERCLEDRNASSGLSLLPSEMYMPKPTSASKINRGMRTPFRPQNRTQRRRQHYQQVQLLYKRDRKQAAGVILDGSPLHVVQPDVEKVDEIFRSRFSRPSPPDDAEFISSPAGVLNMDYITAGEIQQCRDSMKKNNAPGPDRNITMDVLLALELPVLELLFNTWLALKQVPAAFKTARTILIPKSGDTSDPNNWRPITICSLISRLYAKLLASRLSKCANLSERQKAFRPVDGCGENTAILSAVIAQARKTKSQLHVVFLDLAKAFDTIPHTSIVRALKRKALPGHFIDVVENLYTEATTSISVGGKNTSSMPLTSGVKQGCPLSPILFNLVLDELITLIGDDNGVDLNDKKIAILAFADDLVLLSPTTDGMETNLKLCEGFFDKRSMKLNARKSVSLSIVRAHKRKTMLTDERPKWKVHGEFLPTIKHTEEIKYLGVRYSAAGRSIAKFPKLDQWLQRLKKAPLKPQQRIQMVRSTITSRLIHTLRLSRVHAKLLKDLDRKIRSFVKSVLHLPSGTSTDFFYIPVLKGGLGLQEFMTLIPAAKLKLINSMKKSSDQAVIAAMEVDHWLREERWCRKVTLNQGNKNDAERRRLARYINSPRGKSQVGFANLPGQCRWLEGGAKLTGHEYIVGCHLMSNTLPVRTRTFHGG

SEQ ID NO: 2184 - protein, 842 aa, synthetic construct
  source 1..842: note = MG140-3_N1_Trim
FPGKEGRRIQRRKRERLPPRNAKQKRAAEFRVLQELWRKDRSRLATVILDKMPPTAKEPPIGDIEKVYTTRFERPSPEDQHEFTSKPIEEPMEMVRFITVEEVLKNLKAMKSNNAPGLDSNITMKRLRSLPLPCLQLVFNCWLAIGKAPQSMKQCRSKLLPKGAEGLDDVNNWRPLTIGSLLIRLYTRILAMRLQSKVQLHPRQKAFQPLDGCGENIAIVSSLLQDAHERKKELNIIFLDIAKAFDCVSHHSIQRALNRFGLPRAFRRVIEDLYDGATTVFQTSEGDSKTLGISSGVKQGCPLSPVLFNMVMDELIADAPSTEWGYELHDESVGLLAFADDIALVSHSRAMMSHALDYAAGFFEKRNLQLNARKCIGLSIKKAPRRKVMRIEMGSIWSLRNGSDNIPIKMLSPADMARYLGALFSPSGKQTIDLATMKGWITSIEKSRLKPHQKLVMLRTYLLPRVLHHLTIGEPNATTLRRVERELRNSVKRFLKLPVATATPFFHISTKEGGLELPPLLETIAKRKLKWEIRLQKSKDSLIRAVADSPKFRKQFDKARAWIGVPVINRPSDINRRIRELNNGRFERFTSELAVQSRCHRALASNPLRNDWLTGHNPGLYASQFIDALKLVTSQLPTREALNRGNPQADKRCRGCGFSVENQKHVISNCPLVQQERHLRHNRVAQLFARYAKEKGWNIIAEPRIRNPSGEIMRPDIVLRRDDNVAIVDIQIPYEDGGREQLAERYRQKCSKYRQLSTHIQHVLGVTNHTIGAIIVGACGTWCELNNPILDYIGVNTTAIKKNLSIEALRGTLKIFGQFKNRVFRNERVHPSQRPSSGPPVP

SEQ ID NO: 2185 - protein, 829 aa, synthetic construct
  source 1..829: note = MG140-3_N2_Trim
RERLPPRNAKQKRAAEFRVLQELWRKDRSRLATVILDKMPPTAKEPPIGDIEKVYTTRFERPSPEDQHEFTSKPIEEPMEMVRFITVEEVLKNLKAMKSNNAPGLDSNITMKRLRSLPLPCLQLVFNCWLAIGKAPQSMKQCRSKLLPKGAEGLDDVNNWRPLTIGSLLIRLYTRILAMRLQSKVQLHPRQKAFQPLDGCGENIAIVSSLLQDAHERKKELNIIFLDIAKAFDCVSHHSIQRALNRFGLPRAFRRVIEDLYDGATTVFQTSEGDSKTLGISSGVKQGCPLSPVLFNMVMDELIADAPSTEWGYELHDESVGLLAFADDIALVSHSRAMMSHALDYAAGFFEKRNLQLNARKCIGLSIKKAPRRKVMRIEMGSIWSLRNGSDNIPIKMLSPADMARYLGALFSPSGKQTIDLATMKGWITSIEKSRLKPHQKLVMLRTYLLPRVLHHLTIGEPNATTLRRVERELRNSVKRFLKLPVATATPFFHISTKEGGLELPPLLETIAKRKLKWEIRLQKSKDSLIRAVADSPKFRKQFDKARAWIGVPVINRPSDINRRIRELNNGRFERFTSELAVQSRCHRALASNPLRNDWLTGHNPGLYASQFIDALKLVTSQLPTREALNRGNPQADKRCRGCGFSVENQKHVISNCPLVQQERHLRHNRVAQLFARYAKEKGWNIIAEPRIRNPSGEIMRPDIVLRRDDNVAIVDIQIPYEDGGREQLAERYRQKCSKYRQLSTHIQHVLGVTNHTIGAIIVGACGTWCELNNPILDYIGVNTTAIKKNLSIEALRGTLKIFGQFKNRVFRNERVHPSQRPSSGPPVP

SEQ ID NO: 2186 - protein, 824 aa, synthetic construct
  source 1..824: note = MG140-3_N3_Trim
PRNAKQKRAAEFRVLQELWRKDRSRLATVILDKMPPTAKEPPIGDIEKVYTTRFERPSPEDQHEFTSKPIEEPMEMVRFITVEEVLKNLKAMKSNNAPGLDSNITMKRLRSLPLPCLQLVFNCWLAIGKAPQSMKQCRSKLLPKGAEGLDDVNNWRPLTIGSLLIRLYTRILAMRLQSKVQLHPRQKAFQPLDGCGENIAIVSSLLQDAHERKKELNIIFLDIAKAFDCVSHHSIQRALNRFGLPRAFRRVIEDLYDGATTVFQTSEGDSKTLGISSGVKQGCPLSPVLFNMVMDELIADAPSTEWGYELHDESVGLLAFADDIALVSHSRAMMSHALDYAAGFFEKRNLQLNARKCIGLSIKKAPRRKVMRIEMGSIWSLRNGSDNIPIKMLSPADMARYLGALFSPSGKQTIDLATMKGWITSIEKSRLKPHQKLVMLRTYLLPRVLHHLTIGEPNATTLRRVERELRNSVKRFLKLPVATATPFFHISTKEGGLELPPLLETIAKRKLKWEIRLQKSKDSLIRAVADSPKFRKQFDKARAWIGVPVINRPSDINRRIRELNNGRFERFTSELAVQSRCHRALASNPLRNDWLTGHNPGLYASQFIDALKLVTSQLPTREALNRGNPQADKRCRGCGFSVENQKHVISNCPLVQQERHLRHNRVAQLFARYAKEKGWNIIAEPRIRNPSGEIMRPDIVLRRDDNVAIVDIQIPYEDGGREQLAERYRQKCSKYRQLSTHIQHVLGVTNHTIGAIIVGACGTWCELNNPILDYIGVNTTAIKKNLSIEALRGTLKIFGQFKNRVFRNERVHPSQRPSSGPPVP

SEQ ID NO: 2187 - protein, 796 aa, synthetic construct
  source 1..796: note = MG140-3_C4_Trim
MSHSTAAASSGAATGPIVIRYPVNTTNGGTTGEQACFFAESSNCGLAFVDNKSFVDHLLRAHKATRDQIQYICSHCHRQFEKIESVRSHHNICKRKEAVAPDLDARLPVECEVDGCSRRFTTTSGMRLHVKKAHPIEYHASIPQSKRNLWSEGEMRMLARMELDNPGLTNARMNELLHSLHPSRSVDVIRHMRGRNTRYREIMEELVLIGVPEDSDSQAEKTAEPEPEGRINECQLEELVKTHSQIDDARYQASIEYVRRVLRSDDPGEFFNDWLFSCFPGKEGRRIQRRKRERLPPRNAKQKRAAEFRVLQELWRKDRSRLATVILDKMPPTAKEPPIGDIEKVYTTRFERPSPEDQHEFTSKPIEEPMEMVRFITVEEVLKNLKAMKSNNAPGLDSNITMKRLRSLPLPCLQLVFNCWLAIGKAPQSMKQCRSKLLPKGAEGLDDVNNWRPLTIGSLLIRLYTRILAMRLQSKVQLHPRQKAFQPLDGCGENIAIVSSLLQDAHERKKELNIIFLDIAKAFDCVSHHSIQRALNRFGLPRAFRRVIEDLYDGATTVFQTSEGDSKTLGISSGVKQGCPLSPVLFNMVMDELIADAPSTEWGYELHDESVGLLAFADDIALVSHSRAMMSHALDYAAGFFEKRNLQLNARKCIGLSIKKAPRRKVMRIEMGSIWSLRNGSDNIPIKMLSPADMARYLGALFSPSGKQTIDLATMKGWITSIEKSRLKPHQKLVMLRTYLLPRVLHHLTIGEPNATTLRRVERELRNSVKRFLKLPVATATPFFHISTKEGGLELP

SEQ ID NO: 2188 - protein, 925 aa, synthetic construct
  source 1..925: note = MG140-3_C5_Trim
MSHSTAAASSGAATGPIVIRYPVNTTNGGTTGEQACFFAESSNCGLAFVDNKSFVDHLLRAHKATRDQIQYICSHCHRQFEKIESVRSHHNICKRKEAVAPDLDARLPVECEVDGCSRRFTTTSGMRLHVKKAHPIEYHASIPQSKRNLWSEGEMRMLARMELDNPGLTNARMNELLHSLHPSRSVDVIRHMRGRNTRYREIMEELVLIGVPEDSDSQAEKTAEPEPEGRINECQLEELVKTHSQIDDARYQASIEYVRRVLRSDDPGEFFNDWLFSCFPGKEGRRIQRRKRERLPPRNAKQKRAAEFRVLQELWRKDRSRLATVILDKMPPTAKEPPIGDIEKVYTTRFERPSPEDQHEFTSKPIEEPMEMVRFITVEEVLKNLKAMKSNNAPGLDSNITMKRLRSLPLPCLQLVFNCWLAIGKAPQSMKQCRSKLLPKGAEGLDDVNNWRPLTIGSLLIRLYTRILAMRLQSKVQLHPRQKAFQPLDGCGENIAIVSSLLQDAHERKKELNIIFLDIAKAFDCVSHHSIQRALNRFGLPRAFRRVIEDLYDGATTVFQTSEGDSKTLGISSGVKQGCPLSPVLFNMVMDELIADAPSTEWGYELHDESVGLLAFADDIALVSHSRAMMSHALDYAAGFFEKRNLQLNARKCIGLSIKKAPRRKVMRIEMGSIWSLRNGSDNIPIKMLSPADMARYLGALFSPSGKQTIDLATMKGWITSIEKSRLKPHQKLVMLRTYLLPRVLHHLTIGEPNATTLRRVERELRNSVKRFLKLPVATATPFFHISTKEGGLELPPLLETIAKRKLKWEIRLQKSKDSLIRAVADSPKFRKQFDKARAWIGVPVINRPSDINRRIRELNNGRFERFTSELAVQSRCHRALASNPLRNDWLTGHNPGLYASQFIDALKLVTSQLPTREALNRGNP

SEQ ID NO: 2189 - protein, 1246 aa, synthetic construct
  source 1..1246: note = MG140-88_D638A
MGDRVKTAQDAGSKTSSCQRDAPPANAQFVCVSCNSRFDRKSSLSLHSKSCGNTRTKCNYCTVSLTTYKLIRQHERRHHNAEYMRDLEAEKPTPDSAYFAKLAAMEAAAKGGVVSIAAMVTATGLTTHQIRTKRSKPVYQKYLEMAKRDQVAKSKLLFGATSSATSPSTSTSVTNATTTASPPSRAVTVSRQHSADGTAPRKNASSSYTRGPCPKASTSASPPGPPPPSVARIETQTDDGKRRRLSSPTVPAGVPTSERKKKRLQGSPLRPTTSRLLPNTTSASATGLPADTPQENASPGPDPPPAAPNKPADRPPAPLGDESALQQPEAPITSCKRLRSPSLSPAMPLAPALRRTSATVTPLRTRLPHAPPPRLNRDSAMASEFRLALEAVLEAEEPCPGIHRLVTSALSDNNSMFQARLDEFWAATWPTTTSRERRRPPRPSGYGSVHHGKGTRAAEYKKAQELFGKDKRGLANTILEGRPILTPPEVPSIQQVEDVFAAIWEADVADGPIAATSPHIPVPSMPPIFEADVQLAREHWMKSAPGPDGITVAQVCRMNPRVLATVFNILLLRAAVPSSWRVLRTVLIHKGGSRTDPNNWRPLTIASTLQRLFHRVLLRHLTSHTTLHPSQRGFRSVAGTFANAVILDAYIKSRTGQGKAWNIVGIDLSKAFDSVSHNAISKALALAGVDERLATYIITSLTGCATQLDLGGKKSRPINIQRGVKQGDPLSPLLFNLVLDPILQHISTCFKGGTIPGGDKVPVIAFADDLFLLADDDLEIPLMLHMLEEYLTQQGLRINARKCVSISAATIAGKSVVRSKSHYRISESLIPCVGNMNSFKYMGHQFSEKGMMPYNLGNLRTWLERVLKAPLKPHQKMCLLKDHVIPKVLHGLSSPATTGDKLREADRLIRRFVKRALHLQIHTANHLIHARIRDGGLGVLELRKTIPEVSLRRCRGIANATSDPVLASFTSSDHFLKLVNKLEKLAGTVPSTEANRSLIITSPSSSGLEAAADDPASRQWLQSLPQGWTGRDFVRAVHLRTGNLPTRDHHSNPPELRKCRDGCEENESLRHILQLCPRVQAHRIRRHNEIASKVANAMRRKWTVEWEPHVKHEDRKLYKPDMAIHLPDQLVIVDVQVAWEWKENSLAVAWDAKRNKYTTPHFMEAAARRWPGRRVTTLPVILGARGIWPSCNRTTVNTLNLSSALRRSCVESCLKWGSTIHKQFMASVFSQSTRSRPQGLSSRDAG

SEQ ID NO: 2190 - protein, 1246 aa, synthetic construct
  source 1..1246: note = MG140-88_M842A
MGDRVKTAQDAGSKTSSCQRDAPPANAQFVCVSCNSRFDRKSSLSLHSKSCGNTRTKCNYCTVSLTTYKLIRQHERRHHNAEYMRDLEAEKPTPDSAYFAKLAAMEAAAKGGVVSIAAMVTATGLTTHQIRTKRSKPVYQKYLEMAKRDQVAKSKLLFGATSSATSPSTSTSVTNATTTASPPSRAVTVSRQHSADGTAPRKNASSSYTRGPCPKASTSASPPGPPPPSVARIETQTDDGKRRRLSSPTVPAGVPTSERKKKRLQGSPLRPTTSRLLPNTTSASATGLPADTPQENASPGPDPPPAAPNKPADRPPAPLGDESALQQPEAPITSCKRLRSPSLSPAMPLAPALRRTSATVTPLRTRLPHAPPPRLNRDSAMASEFRLALEAVLEAEEPCPGIHRLVTSALSDNNSMFQARLDEFWAATWPTTTSRERRRPPRPSGYGSVHHGKGTRAAEYKKAQELFGKDKRGLANTILEGRPILTPPEVPSIQQVEDVFAAIWEADVADGPIAATSPHIPVPSMPPIFEADVQLAREHWMKSAPGPDGITVAQVCRMNPRVLATVFNILLLRAAVPSSWRVLRTVLIHKGGSRTDPNNWRPLTIASTLQRLFHRVLLRHLTSHTTLHPSQRGFRSVDGTFANAVILDAYIKSRTGQGKAWNIVGIDLSKAFDSVSHNAISKALALAGVDERLATYIITSLTGCATQLDLGGKKSRPINIQRGVKQGDPLSPLLFNLVLDPILQHISTCFKGGTIPGGDKVPVIAFADDLFLLADDDLEIPLMLHMLEEYLTQQGLRINARKCVSISAATIAGKSVVRSKSHYRISESLIPCVGNMNSFKYAGHQFSEKGMMPYNLGNLRTWLERVLKAPLKPHQKMCLLKDHVIPKVLHGLSSPATTGDKLREADRLIRRFVKRALHLQIHTANHLIHARIRDGGLGVLELRKTIPEVSLRRCRGIANATSDPVLASFTSSDHFLKLVNKLEKLAGTVPSTEANRSLIITSPSSSGLEAAADDPASRQWLQSLPQGWTGRDFVRAVHLRTGNLPTRDHHSNPPELRKCRDGCEENESLRHILQLCPRVQAHRIRRHNEIASKVANAMRRKWTVEWEPHVKHEDRKLYKPDMAIHLPDQLVIVDVQVAWEWKENSLAVAWDAKRNKYTTPHFMEAAARRWPGRRVTTLPVILGARGIWPSCNRTTVNTLNLSSALRRSCVESCLKWGSTIHKQFMASVFSQSTRSRPQGLSSRDAG

SEQ ID NO: 2191 - protein, 1246 aa, synthetic construct
  source 1..1246: note = MG140-88_F846A
MGDRVKTAQDAGSKTSSCQRDAPPANAQFVCVSCNSRFDRKSSLSLHSKSCGNTRTKCNYCTVSLTTYKLIRQHERRHHNAEYMRDLEAEKPTPDSAYFAKLAAMEAAAKGGVVSIAAMVTATGLTTHQIRTKRSKPVYQKYLEMAKRDQVAKSKLLFGATSSATSPSTSTSVTNATTTASPPSRAVTVSRQHSADGTAPRKNASSSYTRGPCPKASTSASPPGPPPPSVARIETQTDDGKRRRLSSPTVPAGVPTSERKKKRLQGSPLRPTTSRLLPNTTSASATGLPADTPQENASPGPDPPPAAPNKPADRPPAPLGDESALQQPEAPITSCKRLRSPSLSPAMPLAPALRRTSATVTPLRTRLPHAPPPRLNRDSAMASEFRLALEAVLEAEEPCPGIHRLVTSALSDNNSMFQARLDEFWAATWPTTTSRERRRPPRPSGYGSVHHGKGTRAAEYKKAQELFGKDKRGLANTILEGRPILTPPEVPSIQQVEDVFAAIWEADVADGPIAATSPHIPVPSMPPIFEADVQLAREHWMKSAPGPDGITVAQVCRMNPRVLATVFNILLLRAAVPSSWRVLRTVLIHKGGSRTDPNNWRPLTIASTLQRLFHRVLLRHLTSHTTLHPSQRGFRSVDGTFANAVILDAYIKSRTGQGKAWNIVGIDLSKAFDSVSHNAISKALALAGVDERLATYIITSLTGCATQLDLGGKKSRPINIQRGVKQGDPLSPLLFNLVLDPILQHISTCFKGGTIPGGDKVPVIAFADDLFLLADDDLEIPLMLHMLEEYLTQQGLRINARKCVSISAATIAGKSVVRSKSHYRISESLIPCVGNMNSFKYMGHQASEKGMMPYNLGNLRTWLERVLKAPLKPHQKMCLLKDHVIPKVLHGLSSPATTGDKLREADRLIRRFVKRALHLQIHTANHLIHARIRDGGLGVLELRKTIPEVSLRRCRGIANATSDPVLASFTSSDHFLKLVNKLEKLAGTVPSTEANRSLIITSPSSSGLEAAADDPASRQWLQSLPQGWTGRDFVRAVHLRTGNLPTRDHHSNPPELRKCRDGCEENESLRHILQLCPRVQAHRIRRHNEIASKVANAMRRKWTVEWEPHVKHEDRKLYKPDMAIHLPDQLVIVDVQVAWEWKENSLAVAWDAKRNKYTTPHFMEAAARRWPGRRVTTLPVILGARGIWPSCNRTTVNTLNLSSALRRSCVESCLKWGSTIHKQFMASVFSQSTRSRPQGLSSRDAG

SEQ ID NO: 2192 - protein, 1246 aa, synthetic construct
  source 1..1246: note = MG140-88_L892A
MGDRVKTAQDAGSKTSSCQRDAPPANAQFVCVSCNSRFDRKSSLSLHSKSCGNTRTKCNYCTVSLTTYKLIRQHERRHHNAEYMRDLEAEKPTPDSAYFAKLAAMEAAAKGGVVSIAAMVTATGLTTHQIRTKRSKPVYQKYLEMAKRDQVAKSKLLFGATSSATSPSTSTSVTNATTTASPPSRAVTVSRQHSADGTAPRKNASSSYTRGPCPKASTSASPPGPPPPSVARIETQTDDGKRRRLSSPTVPAGVPTSERKKKRLQGSPLRPTTSRLLPNTTSASATGLPADTPQENASPGPDPPPAAPNKPADRPPAPLGDESALQQPEAPITSCKRLRSPSLSPAMPLAPALRRTSATVTPLRTRLPHAPPPRLNRDSAMASEFRLALEAVLEAEEPCPGIHRLVTSALSDNNSMFQARLDEFWAATWPTTTSRERRRPPRPSGYGSVHHGKGTRAAEYKKAQELFGKDKRGLANTILEGRPILTPPEVPSIQQVEDVFAAIWEADVADGPIAATSPHIPVPSMPPIFEADVQLAREHWMKSAPGPDGITVAQVCRMNPRVLATVFNILLLRAAVPSSWRVLRTVLIHKGGSRTDPNNWRPLTIASTLQRLFHRVLLRHLTSHTTLHPSQRGFRSVDGTFANAVILDAYIKSRTGQGKAWNIVGIDLSKAFDSVSHNAISKALALAGVDERLATYIITSLTGCATQLDLGGKKSRPINIQRGVKQGDPLSPLLFNLVLDPILQHISTCFKGGTIPGGDKVPVIAFADDLFLLADDDLEIPLMLHMLEEYLTQQGLRINARKCVSISAATIAGKSVVRSKSHYRISESLIPCVGNMNSFKYMGHQFSEKGMMPYNLGNLRTWLERVLKAPLKPHQKMCLLKDHVIPKVLHGASSPATTGDKLREADRLIRRFVKRALHLQIHTANHLIHARIRDGGLGVLELRKTIPEVSLRRCRGIANATSDPVLASFTSSDHFLKLVNKLEKLAGTVPSTEANRSLIITSPSSSGLEAAADDPASRQWLQSLPQGWTGRDFVRAVHLRTGNLPTRDHHSNPPELRKCRDGCEENESLRHILQLCPRVQAHRIRRHNEIASKVANAMRRKWTVEWEPHVKHEDRKLYKPDMAIHLPDQLVIVDVQVAWEWKENSLAVAWDAKRNKYTTPHFMEAAARRWPGRRVTTLPVILGARGIWPSCNRTTVNTLNLSSALRRSCVESCLKWGSTIHKQFMASVFSQSTRSRPQGLSSRDAG

SEQ ID NO: 2193 - protein, 1246 aa, synthetic construct
  source 1..1246: note = MG140-88_I909A
MGDRVKTAQDAGSKTSSCQRDAPPANAQFVCVSCNSRFDRKSSLSLHSKSCGNTRTKCNYCTVSLTTYKLIRQHERRHHNAEYMRDLEAEKPTPDSAYFAKLAAMEAAAKGGVVSIAAMVTATGLTTHQIRTKRSKPVYQKYLEMAKRDQVAKSKLLFGATSSATSPSTSTSVTNATTTASPPSRAVTVSRQHSADGTAPRKNASSSYTRGPCPKASTSASPPGPPPPSVARIETQTDDGKRRRLSSPTVPAGVPTSERKKKRLQGSPLRPTTSRLLPNTTSASATGLPADTPQENASPGPDPPPAAPNKPADRPPAPLGDESALQQPEAPITSCKRLRSPSLSPAMPLAPALRRTSATVTPLRTRLPHAPPPRLNRDSAMASEFRLALEAVLEAEEPCPGIHRLVTSALSDNNSMFQARLDEFWAATWPTTTSRERRRPPRPSGYGSVHHGKGTRAAEYKKAQELFGKDKRGLANTILEGRPILTPPEVPSIQQVEDVFAAIWEADVADGPIAATSPHIPVPSMPPIFEADVQLAREHWMKSAPGPDGITVAQVCRMNPRVLATVFNILLLRAAVPSSWRVLRTVLIHKGGSRTDPNNWRPLTIASTLQRLFHRVLLRHLTSHTTLHPSQRGFRSVDGTFANAVILDAYIKSRTGQGKAWNIVGIDLSKAFDSVSHNAISKALALAGVDERLATYIITSLTGCATQLDLGGKKSRPINIQRGVKQGDPLSPLLFNLVLDPILQHISTCFKGGTIPGGDKVPVIAFADDLFLLADDDLEIPLMLHMLEEYLTQQGLRINARKCVSISAATIAGKSVVRSKSHYRISESLIPCVGNMNSFKYMGHQFSEKGMMPYNLGNLRTWLERVLKAPLKPHQKMCLLKDHVIPKVLHGLSSPATTGDKLREADRLARRFVKRALHLQIHTANHLIHARIRDGGLGVLELRKTIPEVSLRRCRGIANATSDPVLASFTSSDHFLKLVNKLEKLAGTVPSTEANRSLIITSPSSSGLEAAADDPASRQWLQSLPQGWTGRDFVRAVHLRTGNLPTRDHHSNPPELRKCRDGCEENESLRHILQLCPRVQAHRIRRHNEIASKVANAMRRKWTVEWEPHVKHEDRKLYKPDMAIHLPDQLVIVDVQVAWEWKENSLAVAWDAKRNKYTTPHFMEAAARRWPGRRVTTLPVILGARGIWPSCNRTTVNTLNLSSALRRSCVESCLKWGSTIHKQFMASVFSQSTRSRPQGLSSRDAG

SEQ ID NO: 2194 - protein, 1246 aa, synthetic construct
  source 1..1246: note = MG140-88_K590A
MGDRVKTAQDAGSKTSSCQRDAPPANAQFVCVSCNSRFDRKSSLSLHSKSCGNTRTKCNYCTVSLTTYKLIRQHERRHHNAEYMRDLEAEKPTPDSAYFAKLAAMEAAAKGGVVSIAAMVTATGLTTHQIRTKRSKPVYQKYLEMAKRDQVAKSKLLFGATSSATSPSTSTSVTNATTTASPPSRAVTVSRQHSADGTAPRKNASSSYTRGPCPKASTSASPPGPPPPSVARIETQTDDGKRRRLSSPTVPAGVPTSERKKKRLQGSPLRPTTSRLLPNTTSASATGLPADTPQENASPGPDPPPAAPNKPADRPPAPLGDESALQQPEAPITSCKRLRSPSLSPAMPLAPALRRTSATVTPLRTRLPHAPPPRLNRDSAMASEFRLALEAVLEAEEPCPGIHRLVTSALSDNNSMFQARLDEFWAATWPTTTSRERRRPPRPSGYGSVHHGKGTRAAEYKKAQELFGKDKRGLANTILEGRPILTPPEVPSIQQVEDVFAAIWEADVADGPIAATSPHIPVPSMPPIFEADVQLAREHWMKSAPGPDGITVAQVCRMNPRVLATVFNILLLRAAVPSSWRVLRTVLIHAGGSRTDPNNWRPLTIASTLQRLFHRVLLRHLTSHTTLHPSQRGFRSVDGTFANAVILDAYIKSRTGQGKAWNIVGIDLSKAFDSVSHNAISKALALAGVDERLATYIITSLTGCATQLDLGGKKSRPINIQRGVKQGDPLSPLLFNLVLDPILQHISTCFKGGTIPGGDKVPVIAFADDLFLLADDDLEIPLMLHMLEEYLTQQGLRINARKCVSISAATIAGKSVVRSKSHYRISESLIPCVGNMNSFKYMGHQFSEKGMMPYNLGNLRTWLERVLKAPLKPHQKMCLLKDHVIPKVLHGLSSPATTGDKLREADRLIRRFVKRALHLQIHTANHLIHARIRDGGLGVLELRKTIPEVSLRRCRGIANATSDPVLASFTSSDHFLKLVNKLEKLAGTVPSTEANRSLIITSPSSSGLEAAADDPASRQWLQSLPQGWTGRDFVRAVHLRTGNLPTRDHHSNPPELRKCRDGCEENESLRHILQLCPRVQAHRIRRHNEIASKVANAMRRKWTVEWEPHVKHEDRKLYKPDMAIHLPDQLVIVDVQVAWEWKENSLAVAWDAKRNKYTTPHFMEAAARRWPGRRVTTLPVILGARGIWPSCNRTTVNTLNLSSALRRSCVESCLKWGSTIHKQFMASVFSQSTRSRPQGLSSRDAG

SEQ ID NO: 2195 - protein, 1246 aa, synthetic construct
  source 1..1246: note = MG140-88_R601A
MGDRVKTAQDAGSKTSSCQRDAPPANAQFVCVSCNSRFDRKSSLSLHSKSCGNTRTKCNYCTVSLTTYKLIRQHERRHHNAEYMRDLEAEKPTPDSAYFAKLAAMEAAAKGGVVSIAAMVTATGLTTHQIRTKRSKPVYQKYLEMAKRDQVAKSKLLFGATSSATSPSTSTSVTNATTTASPPSRAVTVSRQHSADGTAPRKNASSSYTRGPCPKASTSASPPGPPPPSVARIETQTDDGKRRRLSSPTVPAGVPTSERKKKRLQGSPLRPTTSRLLPNTTSASATGLPADTPQENASPGPDPPPAAPNKPADRPPAPLGDESALQQPEAPITSCKRLRSPSLSPAMPLAPALRRTSATVTPLRTRLPHAPPPRLNRDSAMASEFRLALEAVLEAEEPCPGIHRLVTSALSDNNSMFQARLDEFWAATWPTTTSRERRRPPRPSGYGSVHHGKGTRAAEYKKAQELFGKDKRGLANTILEGRPILTPPEVPSIQQVEDVFAAIWEADVADGPIAATSPHIPVPSMPPIFEADVQLAREHWMKSAPGPDGITVAQVCRMNPRVLATVFNILLLRAAVPSSWRVLRTVLIHKGGSRTDPNNWAPLTIASTLQRLFHRVLLRHLTSHTTLHPSQRGFRSVDGTFANAVILDAYIKSRTGQGKAWNIVGIDLSKAFDSVSHNAISKALALAGVDERLATYIITSLTGCATQLDLGGKKSRPINIQRGVKQGDPLSPLLFNLVLDPILQHISTCFKGGTIPGGDKVPVIAFADDLFLLADDDLEIPLMLHMLEEYLTQQGLRINARKCVSISAATIAGKSVVRSKSHYRISESLIPCVGNMNSFKYMGHQFSEKGMMPYNLGNLRTWLERVLKAPLKPHQKMCLLKDHVIPKVLHGLSSPATTGDKLREADRLIRRFVKRALHLQIHTANHLIHARIRDGGLGVLELRKTIPEVSLRRCRGIANATSDPVLASFTSSDHFLKLVNKLEKLAGTVPSTEANRSLIITSPSSSGLEAAADDPASRQWLQSLPQGWTGRDFVRAVHLRTGNLPTRDHHSNPPELRKCRDGCEENESLRHILQLCPRVQAHRIRRHNEIASKVANAMRRKWTVEWEPHVKHEDRKLYKPDMAIHLPDQLVIVDVQVAWEWKENSLAVAWDAKRNKYTTPHFMEAAARRWPGRRVTTLPVILGARGIWPSCNRTTVNTLNLSSALRRSCVESCLKWGSTIHKQFMASVFSQSTRSRPQGLSSRDAG

SEQ ID NO: 2196 - protein, 1246 aa, synthetic construct
  source 1..1246: note = MG140-88_L603A
MGDRVKTAQDAGSKTSSCQRDAPPANAQFVCVSCNSRFDRKSSLSLHSKSCGNTRTKCNYCTVSLTTYKLIRQHERRHHNAEYMRDLEAEKPTPDSAYFAKLAAMEAAAKGGVVSIAAMVTATGLTTHQIRTKRSKPVYQKYLEMAKRDQVAKSKLLFGATSSATSPSTSTSVTNATTTASPPSRAVTVSRQHSADGTAPRKNASSSYTRGPCPKASTSASPPGPPPPSVARIETQTDDGKRRRLSSPTVPAGVPTSERKKKRLQGSPLRPTTSRLLPNTTSASATGLPADTPQENASPGPDPPPAAPNKPADRPPAPLGDESALQQPEAPITSCKRLRSPSLSPAMPLAPALRRTSATVTPLRTRLPHAPPPRLNRDSAMASEFRLALEAVLEAEEPCPGIHRLVTSALSDNNSMFQARLDEFWAATWPTTTSRERRRPPRPSGYGSVHHGKGTRAAEYKKAQELFGKDKRGLANTILEGRPILTPPEVPSIQQVEDVFAAIWEADVADGPIAATSPHIPVPSMPPIFEADVQLAREHWMKSAPGPDGITVAQVCRMNPRVLATVFNILLLRAAVPSSWRVLRTVLIHKGGSRTDPNNWRPATIASTLQRLFHRVLLRHLTSHTTLHPSQRGFRSVDGTFANAVILDAYIKSRTGQGKAWNIVGIDLSKAFDSVSHNAISKALALAGVDERLATYIITSLTGCATQLDLGGKKSRPINIQRGVKQGDPLSPLLFNLVLDPILQHISTCFKGGTIPGGDKVPVIAFADDLFLLADDDLEIPLMLHMLEEYLTQQGLRINARKCVSISAATIAGKSVVRSKSHYRISESLIPCVGNMNSFKYMGHQFSEKGMMPYNLGNLRTWLERVLKAPLKPHQKMCLLKDHVIPKVLHGLSSPATTGDKLREADRLIRRFVKRALHLQIHTANHLIHARIRDGGLGVLELRKTIPEVSLRRCRGIANATSDPVLASFTSSDHFLKLVNKLEKLAGTVPSTEANRSLIITSPSSSGLEAAADDPASRQWLQSLPQGWTGRDFVRAVHLRTGNLPTRDHHSNPPELRKCRDGCEENESLRHILQLCPRVQAHRIRRHNEIASKVANAMRRKWTVEWEPHVKHEDRKLYKPDMAIHLPDQLVIVDVQVAWEWKENSLAVAWDAKRNKYTTPHFMEAAARRWPGRRVTTLPVILGARGIWPSCNRTTVNTLNLSSALRRSCVESCLKWGSTIHKQFMASVFSQSTRSRPQGLSSRDAG

SEQ ID NO: 2197 - protein, 1246 aa, synthetic construct
  source 1..1246: note = MG140-88_R611A
MGDRVKTAQDAGSKTSSCQRDAPPANAQFVCVSCNSRFDRKSSLSLHSKSCGNTRTKCNYCTVSLTTYKLIRQHERRHHNAEYMRDLEAEKPTPDSAYFAKLAAMEAAAKGGVVSIAAMVTATGLTTHQIRTKRSKPVYQKYLEMAKRDQVAKSKLLFGATSSATSPSTSTSVTNATTTASPPSRAVTVSRQHSADGTAPRKNASSSYTRGPCPKASTSASPPGPPPPSVARIETQTDDGKRRRLSSPTVPAGVPTSERKKKRLQGSPLRPTTSRLLPNTTSASATGLPADTPQENASPGPDPPPAAPNKPADRPPAPLGDESALQQPEAPITSCKRLRSPSLSPAMPLAPALRRTSATVTPLRTRLPHAPPPRLNRDSAMASEFRLALEAVLEAEEPCPGIHRLVTSALSDNNSMFQARLDEFWAATWPTTTSRERRRPPRPSGYGSVHHGKGTRAAEYKKAQELFGKDKRGLANTILEGRPILTPPEVPSIQQVEDVFAAIWEADVADGPIAATSPHIPVPSMPPIFEADVQLAREHWMKSAPGPDGITVAQVCRMNPRVLATVFNILLLRAAVPSSWRVLRTVLIHKGGSRTDPNNWRPLTIASTLQALFHRVLLRHLTSHTTLHPSQRGFRSVDGTFANAVILDAYIKSRTGQGKAWNIVGIDLSKAFDSVSHNAISKALALAGVDERLATYIITSLTGCATQLDLGGKKSRPINIQRGVKQGDPLSPLLFNLVLDPILQHISTCFKGGTIPGGDKVPVIAFADDLFLLADDDLEIPLMLHMLEEYLTQQGLRINARKCVSISAATIAGKSVVRSKSHYRISESLIPCVGNMNSFKYMGHQFSEKGMMPYNLGNLRTWLERVLKAPLKPHQKMCLLKDHVIPKVLHGLSSPATTGDKLREADRLIRRFVKRALHLQIHTANHLIHARIRDGGLGVLELRKTIPEVSLRRCRGIANATSDPVLASFTSSDHFLKLVNKLEKLAGTVPSTEANRSLIITSPSSSGLEAAADDPASRQWLQSLPQGWTGRDFVRAVHLRTGNLPTRDHHSNPPELRKCRDGCEENESLRHILQLCPRVQAHRIRRHNEIASKVANAMRRKWTVEWEPHVKHEDRKLYKPDMAIHLPDQLVIVDVQVAWEWKENSLAVAWDAKRNKYTTPHFMEAAARRWPGRRVTTLPVILGARGIWPSCNRTTVNTLNLSSALRRSCVESCLKWGSTIHKQFMASVFSQSTRSRPQGLSSRDAG

SEQ ID NO: 2198 - protein, 1246 aa, synthetic construct
  source 1..1246: note = MG140-88_F672G
MGDRVKTAQDAGSKTSSCQRDAPPANAQFVCVSCNSRFDRKSSLSLHSKSCGNTRTKCNYCTVSLTTYKLIRQHERRHHNAEYMRDLEAEKPTPDSAYFAKLAAMEAAAKGGVVSIAAMVTATGLTTHQIRTKRSKPVYQKYLEMAKRDQVAKSKLLFGATSSATSPSTSTSVTNATTTASPPSRAVTVSRQHSADGTAPRKNASSSYTRGPCPKASTSASPPGPPPPSVARIETQTDDGKRRRLSSPTVPAGVPTSERKKKRLQGSPLRPTTSRLLPNTTSASATGLPADTPQENASPGPDPPPAAPNKPADRPPAPLGDESALQQPEAPITSCKRLRSPSLSPAMPLAPALRRTSATVTPLRTRLPHAPPPRLNRDSAMASEFRLALEAVLEAEEPCPGIHRLVTSALSDNNSMFQARLDEFWAATWPTTTSRERRRPPRPSGYGSVHHGKGTRAAEYKKAQELFGKDKRGLANTILEGRPILTPPEVPSIQQVEDVFAAIWEADVADGPIAATSPHIPVPSMPPIFEADVQLAREHWMKSAPGPDGITVAQVCRMNPRVLATVFNILLLRAAVPSSWRVLRTVLIHKGGSRTDPNNWRPLTIASTLQRLFHRVLLRHLTSHTTLHPSQRGFRSVDGTFANAVILDAYIKSRTGQGKAWNIVGIDLSKAGDSVSHNAISKALALAGVDERLATYIITSLTGCATQLDLGGKKSRPINIQRGVKQGDPLSPLLFNLVLDPILQHISTCFKGGTIPGGDKVPVIAFADDLFLLADDDLEIPLMLHMLEEYLTQQGLRINARKCVSISAATIAGKSVVRSKSHYRISESLIPCVGNMNSFKYMGHQFSEKGMMPYNLGNLRTWLERVLKAPLKPHQKMCLLKDHVIPKVLHGLSSPATTGDKLREADRLIRRFVKRALHLQIHTANHLIHARIRDGGLGVLELRKTIPEVSLRRCRGIANATSDPVLASFTSSDHFLKLVNKLEKLAGTVPSTEANRSLIITSPSSSGLEAAADDPASRQWLQSLPQGWTGRDFVRAVHLRTGNLPTRDHHSNPPELRKCRDGCEENESLRHILQLCPRVQAHRIRRHNEIASKVANAMRRKWTVEWEPHVKHEDRKLYKPDMAIHLPDQLVIVDVQVAWEWKENSLAVAWDAKRNKYTTPHFMEAAARRWPGRRVTTLPVILGARGIWPSCNRTTVNTLNLSSALRRSCVESCLKWGSTIHKQFMASVFSQSTRSRPQGLSSRDAG

SEQ ID NO: 2199 - protein, 1035 aa, synthetic construct
  source 1..1035: note = MG140-74_G326A
MFACGQCERTFGNKGALGNHCKWKHAQTRLPERTNGGEFPCPDCDNAYGSSGGLNVHRRARHPDVYHAARQPAARVKARWSYEELVLVARAELEIRGTNPPQGVVRVLHSRFPDRTFEAIKCLRNKNPRYKEVLAALEVEEVDEGLPTVTPSEQTHAFAQADGLWRDQLRMAINIEHLGVDDLDWVADGCPAEDIRKKLDELFASWVGHLVRGERAPARSHQPAAGVTNPSRELDPRRRRRAQYSAIQHLYGRKPSAAAHKVLDGSWECGDPVPTPTLEDFRMAWQPIFETPSIKDNRRPTCVGQVRWEIVSPVTPGELEKVLTEAASSAPGPDGVKLKDVIGLGIGELCSHFNLWLLCGSQPSAMCVGRTIYIPKGSESNDALKYRPITIASHILRVFHKIMARRFDAFLPLKYTQKGFRSGDGIAQHVLSLQAIIDGAKRQRKPVNLVFLDVRKAFDSVSHDTIVLAMRRLGCPDPFLSYIRDLYSRSSTVIEHNGERSAPIFTRRGVKQGDPLSPFMFNAVIDWAFSSLDDHVGFSFGHVRVNNLGYADDVALLSDTRAGLRSQLGKFESHLAKGGLTISAGTEGKSSSLSIVVDGKAKRWVVDQTPFLATNEGIIPSLSASGEYRYLGIMLGSGGAKVRSSLREELLQGLQNITRAPLKPYQRMRILRNFLLPKYLHELVLAPVADGWLNWLDTAIRANVRQWLKLPQDTPVAFIHAGTGDGGLSVPSLRYSVPVMRRKRLEAVHSATDPLSTALTASPFFQKELSGLSRKTLGGRLVTDKQSLAQAWAGCLYTKVDGRGLSEARSCAEGSRWVSNPPRNQSGANYIGAIKARGGLLYSKVRSARGDSGRDVRCDSCMRPETAQHIIQVCPRTSGPRMRRHDRVVQFVSAAAERAGYKVLVEPRIVGRTLGVRKPDLVLWNESRAYVADVTITSDQVGGVKAHRDKVAYYDQPEIREWVERFTGLSHISFSAVAANWRGVLSPLSADFLKSVLKLSNWDISLLGLRICEETYHIHRYFGRSTYRVRGRGPS

SEQ ID NO: 2200 - protein, 1035 aa, synthetic construct
  source 1..1035: note = MG140-74_K339A
MFACGQCERTFGNKGALGNHCKWKHAQTRLPERTNGGEFPCPDCDNAYGSSGGLNVHRRARHPDVYHAARQPAARVKARWSYEELVLVARAELEIRGTNPPQGVVRVLHSRFPDRTFEAIKCLRNKNPRYKEVLAALEVEEVDEGLPTVTPSEQTHAFAQADGLWRDQLRMAINIEHLGVDDLDWVADGCPAEDIRKKLDELFASWVGHLVRGERAPARSHQPAAGVTNPSRELDPRRRRRAQYSAIQHLYGRKPSAAAHKVLDGSWECGDPVPTPTLEDFRMAWQPIFETPSIKDNRRPTCVGQVRWEIVSPVTPGELEKVLTEGASSAPGPDGVKLADVIGLGIGELCSHFNLWLLCGSQPSAMCVGRTIYIPKGSESNDALKYRPITIASHILRVFHKIMARRFDAFLPLKYTQKGFRSGDGIAQHVLSLQAIIDGAKRQRKPVNLVFLDVRKAFDSVSHDTIVLAMRRLGCPDPFLSYIRDLYSRSSTVIEHNGERSAPIFTRRGVKQGDPLSPFMFNAVIDWAFSSLDDHVGFSFGHVRVNNLGYADDVALLSDTRAGLRSQLGKFESHLAKGGLTISAGTEGKSSSLSIVVDGKAKRWVVDQTPFLATNEGIIPSLSASGEYRYLGIMLGSGGAKVRSSLREELLQGLQNITRAPLKPYQRMRILRNFLLPKYLHELVLAPVADGWLNWLDTAIRANVRQWLKLPQDTPVAFIHAGTGDGGLSVPSLRYSVPVMRRKRLEAVHSATDPLSTALTASPFFQKELSGLSRKTLGGRLVTDKQSLAQAWAGCLYTKVDGRGLSEARSCAEGSRWVSNPPRNQSGANYIGAIKARGGLLYSKVRSARGDSGRDVRCDSCMRPETAQHIIQVCPRTSGPRMRRHDRVVQFVSAAAERAGYKVLVEPRIVGRTLGVRKPDLVLWNESRAYVADVTITSDQVGGVKAHRDKVAYYDQPEIREWVERFTGLSHISFSAVAANWRGVLSPLSADFLKSVLKLSNWDISLLGLRICEETYHIHRYFGRSTYRVRGRGPS

SEQ ID NO: 2201 - protein, 1035 aa, synthetic construct
  source 1..1035: note = MG140-74_D424A
MFACGQCERTFGNKGALGNHCKWKHAQTRLPERTNGGEFPCPDCDNAYGSSGGLNVHRRARHPDVYHAARQPAARVKARWSYEELVLVARAELEIRGTNPPQGVVRVLHSRFPDRTFEAIKCLRNKNPRYKEVLAALEVEEVDEGLPTVTPSEQTHAFAQADGLWRDQLRMAINIEHLGVDDLDWVADGCPAEDIRKKLDELFASWVGHLVRGERAPARSHQPAAGVTNPSRELDPRRRRRAQYSAIQHLYGRKPSAAAHKVLDGSWECGDPVPTPTLEDFRMAWQPIFETPSIKDNRRPTCVGQVRWEIVSPVTPGELEKVLTEGASSAPGPDGVKLKDVIGLGIGELCSHFNLWLLCGSQPSAMCVGRTIYIPKGSESNDALKYRPITIASHILRVFHKIMARRFDAFLPLKYTQKGFRSGAGIAQHVLSLQAIIDGAKRQRKPVNLVFLDVRKAFDSVSHDTIVLAMRRLGCPDPFLSYIRDLYSRSSTVIEHNGERSAPIFTRRGVKQGDPLSPFMFNAVIDWAFSSLDDHVGFSFGHVRVNNLGYADDVALLSDTRAGLRSQLGKFESHLAKGGLTISAGTEGKSSSLSIVVDGKAKRWVVDQTPFLATNEGIIPSLSASGEYRYLGIMLGSGGAKVRSSLREELLQGLQNITRAPLKPYQRMRILRNFLLPKYLHELVLAPVADGWLNWLDTAIRANVRQWLKLPQDTPVAFIHAGTGDGGLSVPSLRYSVPVMRRKRLEAVHSATDPLSTALTASPFFQKELSGLSRKTLGGRLVTDKQSLAQAWAGCLYTKVDGRGLSEARSCAEGSRWVSNPPRNQSGANYIGAIKARGGLLYSKVRSARGDSGRDVRCDSCMRPETAQHIIQVCPRTSGPRMRRHDRVVQFVSAAAERAGYKVLVEPRIVGRTLGVRKPDLVLWNESRAYVADVTITSDQVGGVKAHRDKVAYYDQPEIREWVERFTGLSHISFSAVAANWRGVLSPLSADFLKSVLKLSNWDISLLGLRICEETYHIHRYFGRSTYRVRGRGPS

SEQ ID NO: 2202 - protein, 1035 aa, synthetic construct
  source 1..1035: note = MG140-74_L631A
MFACGQCERTFGNKGALGNHCKWKHAQTRLPERTNGGEFPCPDCDNAYGSSGGLNVHRRARHPDVYHAARQPAARVKARWSYEELVLVARAELEIRGTNPPQGVVRVLHSRFPDRTFEAIKCLRNKNPRYKEVLAALEVEEVDEGLPTVTPSEQTHAFAQADGLWRDQLRMAINIEHLGVDDLDWVADGCPAEDIRKKLDELFASWVGHLVRGERAPARSHQPAAGVTNPSRELDPRRRRRAQYSAIQHLYGRKPSAAAHKVLDGSWECGDPVPTPTLEDFRMAWQPIFETPSIKDNRRPTCVGQVRWEIVSPVTPGELEKVLTEGASSAPGPDGVKLKDVIGLGIGELCSHFNLWLLCGSQPSAMCVGRTIYIPKGSESNDALKYRPITIASHILRVFHKIMARRFDAFLPLKYTQKGFRSGDGIAQHVLSLQAIIDGAKRQRKPVNLVFLDVRKAFDSVSHDTIVLAMRRLGCPDPFLSYIRDLYSRSSTVIEHNGERSAPIFTRRGVKQGDPLSPFMFNAVIDWAFSSLDDHVGFSFGHVRVNNLGYADDVALLSDTRAGLRSQLGKFESHLAKGGLTISAGTEGKSSSLSIVVDGKAKRWVVDQTPFLATNEGIIPSLSASGEYRYAGIMLGSGGAKVRSSLREELLQGLQNITRAPLKPYQRMRILRNFLLPKYLHELVLAPVADGWLNWLDTAIRANVRQWLKLPQDTPVAFIHAGTGDGGLSVPSLRYSVPVMRRKRLEAVHSATDPLSTALTASPFFQKELSGLSRKTLGGRLVTDKQSLAQAWAGCLYTKVDGRGLSEARSCAEGSRWVSNPPRNQSGANYIGAIKARGGLLYSKVRSARGDSGRDVRCDSCMRPETAQHIIQVCPRTSGPRMRRHDRVVQFVSAAAERAGYKVLVEPRIVGRTLGVRKPDLVLWNESRAYVADVTITSDQVGGVKAHRDKVAYYDQPEIREWVERFTGLSHISFSAVAANWRGVLSPLSADFLKSVLKLSNWDISLLGLRICEETYHIHRYFGRSTYRVRGRGPS

SEQ ID NO: 2203 - protein, 1035 aa, synthetic construct
  source 1..1035: note = MG140-74_L635A
MFACGQCERTFGNKGALGNHCKWKHAQTRLPERTNGGEFPCPDCDNAYGSSGGLNVHRRARHPDVYHAARQPAARVKARWSYEELVLVARAELEIRGTNPPQGVVRVLHSRFPDRTFEAIKCLRNKNPRYKEVLAALEVEEVDEGLPTVTPSEQTHAFAQADGLWRDQLRMAINIEHLGVDDLDWVADGCPAEDIRKKLDELFASWVGHLVRGERAPARSHQPAAGVTNPSRELDPRRRRRAQYSAIQHLYGRKPSAAAHKVLDGSWECGDPVPTPTLEDFRMAWQPIFETPSIKDNRRPTCVGQVRWEIVSPVTPGELEKVLTEGASSAPGPDGVKLKDVIGLGIGELCSHFNLWLLCGSQPSAMCVGRTIYIPKGSESNDALKYRPITIASHILRVFHKIMARRFDAFLPLKYTQKGFRSGDGIAQHVLSLQAIIDGAKRQRKPVNLVFLDVRKAFDSVSHDTIVLAMRRLGCPDPFLSYIRDLYSRSSTVIEHNGERSAPIFTRRGVKQGDPLSPFMFNAVIDWAFSSLDDHVGFSFGHVRVNNLGYADDVALLSDTRAGLRSQLGKFESHLAKGGLTISAGTEGKSSSLSIVVDGKAKRWVVDQTPFLATNEGIIPSLSASGEYRYLGIMAGSGGAKVRSSLREELLQGLQNITRAPLKPYQRMRILRNFLLPKYLHELVLAPVADGWLNWLDTAIRANVRQWLKLPQDTPVAFIHAGTGDGGLSVPSLRYSVPVMRRKRLEAVHSATDPLSTALTASPFFQKELSGLSRKTLGGRLVTDKQSLAQAWAGCLYTKVDGRGLSEARSCAEGSRWVSNPPRNQSGANYIGAIKARGGLLYSKVRSARGDSGRDVRCDSCMRPETAQHIIQVCPRTSGPRMRRHDRVVQFVSAAAERAGYKVLVEPRIVGRTLGVRKPDLVLWNESRAYVADVTITSDQVGGVKAHRDKVAYYDQPEIREWVERFTGLSHISFSAVAANWRGVLSPLSADFLKSVLKLSNWDISLLGLRICEETYHIHRYFGRSTYRVRGRGPS

SEQ ID NO: 2204 - protein, 1035 aa, synthetic construct
  source 1..1035: note = MG140-74_L683A
MFACGQCERTFGNKGALGNHCKWKHAQTRLPERTNGGEFPCPDCDNAYGSSGGLNVHRRARHPDVYHAARQPAARVKARWSYEELVLVARAELEIRGTNPPQGVVRVLHSRFPDRTFEAIKCLRNKNPRYKEVLAALEVEEVDEGLPTVTPSEQTHAFAQADGLWRDQLRMAINIEHLGVDDLDWVADGCPAEDIRKKLDELFASWVGHLVRGERAPARSHQPAAGVTNPSRELDPRRRRRAQYSAIQHLYGRKPSAAAHKVLDGSWECGDPVPTPTLEDFRMAWQPIFETPSIKDNRRPTCVGQVRWEIVSPVTPGELEKVLTEGASSAPGPDGVKLKDVIGLGIGELCSHFNLWLLCGSQPSAMCVGRTIYIPKGSESNDALKYRPITIASHILRVFHKIMARRFDAFLPLKYTQKGFRSGDGIAQHVLSLQAIIDGAKRQRKPVNLVFLDVRKAFDSVSHDTIVLAMRRLGCPDPFLSYIRDLYSRSSTVIEHNGERSAPIFTRRGVKQGDPLSPFMFNAVIDWAFSSLDDHVGFSFGHVRVNNLGYADDVALLSDTRAGLRSQLGKFESHLAKGGLTISAGTEGKSSSLSIVVDGKAKRWVVDQTPFLATNEGIIPSLSASGEYRYLGIMLGSGGAKVRSSLREELLQGLQNITRAPLKPYQRMRILRNFLLPKYLHEAVLAPVADGWLNWLDTAIRANVRQWLKLPQDTPVAFIHAGTGDGGLSVPSLRYSVPVMRRKRLEAVHSATDPLSTALTASPFFQKELSGLSRKTLGGRLVTDKQSLAQAWAGCLYTKVDGRGLSEARSCAEGSRWVSNPPRNQSGANYIGAIKARGGLLYSKVRSARGDSGRDVRCDSCMRPETAQHIIQVCPRTSGPRMRRHDRVVQFVSAAAERAGYKVLVEPRIVGRTLGVRKPDLVLWNESRAYVADVTITSDQVGGVKAHRDKVAYYDQPEIREWVERFTGLSHISFSAVAANWRGVLSPLSADFLKSVLKLSNWDISLLGLRICEETYHIHRYFGRSTYRVRGRGPS

SEQ ID NO: 2205 - protein, 1035 aa, synthetic construct
  source 1..1035: note = MG140-74_I700A
MFACGQCERTFGNKGALGNHCKWKHAQTRLPERTNGGEFPCPDCDNAYGSSGGLNVHRRARHPDVYHAARQPAARVKARWSYEELVLVARAELEIRGTNPPQGVVRVLHSRFPDRTFEAIKCLRNKNPRYKEVLAALEVEEVDEGLPTVTPSEQTHAFAQADGLWRDQLRMAINIEHLGVDDLDWVADGCPAEDIRKKLDELFASWVGHLVRGERAPARSHQPAAGVTNPSRELDPRRRRRAQYSAIQHLYGRKPSAAAHKVLDGSWECGDPVPTPTLEDFRMAWQPIFETPSIKDNRRPTCVGQVRWEIVSPVTPGELEKVLTEGASSAPGPDGVKLKDVIGLGIGELCSHFNLWLLCGSQPSAMCVGRTIYIPKGSESNDALKYRPITIASHILRVFHKIMARRFDAFLPLKYTQKGFRSGDGIAQHVLSLQAIIDGAKRQRKPVNLVFLDVRKAFDSVSHDTIVLAMRRLGCPDPFLSYIRDLYSRSSTVIEHNGERSAPIFTRRGVKQGDPLSPFMFNAVIDWAFSSLDDHVGFSFGHVRVNNLGYADDVALLSDTRAGLRSQLGKFESHLAKGGLTISAGTEGKSSSLSIVVDGKAKRWVVDQTPFLATNEGIIPSLSASGEYRYLGIMLGSGGAKVRSSLREELLQGLQNITRAPLKPYQRMRILRNFLLPKYLHELVLAPVADGWLNWLDTAARANVRQWLKLPQDTPVAFIHAGTGDGGLSVPSLRYSVPVMRRKRLEAVHSATDPLSTALTASPFFQKELSGLSRKTLGGRLVTDKQSLAQAWAGCLYTKVDGRGLSEARSCAEGSRWVSNPPRNQSGANYIGAIKARGGLLYSKVRSARGDSGRDVRCDSCMRPETAQHIIQVCPRTSGPRMRRHDRVVQFVSAAAERAGYKVLVEPRIVGRTLGVRKPDLVLWNESRAYVADVTITSDQVGGVKAHRDKVAYYDQPEIREWVERFTGLSHISFSAVAANWRGVLSPLSADFLKSVLKLSNWDISLLGLRICEETYHIHRYFGRSTYRVRGRGPS

SEQ ID NO: 2206 - protein, 1035 aa, synthetic construct
  source 1..1035: note = MG140-74_K376A
MFACGQCERTFGNKGALGNHCKWKHAQTRLPERTNGGEFPCPDCDNAYGSSGGLNVHRRARHPDVYHAARQPAARVKARWSYEELVLVARAELEIRGTNPPQGVVRVLHSRFPDRTFEAIKCLRNKNPRYKEVLAALEVEEVDEGLPTVTPSEQTHAFAQADGLWRDQLRMAINIEHLGVDDLDWVADGCPAEDIRKKLDELFASWVGHLVRGERAPARSHQPAAGVTNPSRELDPRRRRRAQYSAIQHLYGRKPSAAAHKVLDGSWECGDPVPTPTLEDFRMAWQPIFETPSIKDNRRPTCVGQVRWEIVSPVTPGELEKVLTEGASSAPGPDGVKLKDVIGLGIGELCSHFNLWLLCGSQPSAMCVGRTIYIPAGSESNDALKYRPITIASHILRVFHKIMARRFDAFLPLKYTQKGFRSGDGIAQHVLSLQAIIDGAKRQRKPVNLVFLDVRKAFDSVSHDTIVLAMRRLGCPDPFLSYIRDLYSRSSTVIEHNGERSAPIFTRRGVKQGDPLSPFMFNAVIDWAFSSLDDHVGFSFGHVRVNNLGYADDVALLSDTRAGLRSQLGKFESHLAKGGLTISAGTEGKSSSLSIVVDGKAKRWVVDQTPFLATNEGIIPSLSASGEYRYLGIMLGSGGAKVRSSLREELLQGLQNITRAPLKPYQRMRILRNFLLPKYLHELVLAPVADGWLNWLDTAIRANVRQWLKLPQDTPVAFIHAGTGDGGLSVPSLRYSVPVMRRKRLEAVHSATDPLSTALTASPFFQKELSGLSRKTLGGRLVTDKQSLAQAWAGCLYTKVDGRGLSEARSCAEGSRWVSNPPRNQSGANYIGAIKARGGLLYSKVRSARGDSGRDVRCDSCMRPETAQHIIQVCPRTSGPRMRRHDRVVQFVSAAAERAGYKVLVEPRIVGRTLGVRKPDLVLWNESRAYVADVTITSDQVGGVKAHRDKVAYYDQPEIREWVERFTGLSHISFSAVAANWRGVLSPLSADFLKSVLKLSNWDISLLGLRICEETYHIHRYFGRSTYRVRGRGPS

SEQ ID NO: 2207 - protein, 1035 aa, synthetic construct
  source 1..1035: note = MG140-74_R387A
MFACGQCERTFGNKGALGNHCKWKHAQTRLPERTNGGEFPCPDCDNAYGSSGGLNVHRRARHPDVYHAARQPAARVKARWSYEELVLVARAELEIRGTNPPQGVVRVLHSRFPDRTFEAIKCLRNKNPRYKEVLAALEVEEVDEGLPTVTPSEQTHAFAQADGLWRDQLRMAINIEHLGVDDLDWVADGCPAEDIRKKLDELFASWVGHLVRGERAPARSHQPAAGVTNPSRELDPRRRRRAQYSAIQHLYGRKPSAAAHKVLDGSWECGDPVPTPTLEDFRMAWQPIFETPSIKDNRRPTCVGQVRWEIVSPVTPGELEKVLTEGASSAPGPDGVKLKDVIGLGIGELCSHFNLWLLCGSQPSAMCVGRTIYIPKGSESNDALKYAPITIASHILRVFHKIMARRFDAFLPLKYTQKGFRSGDGIAQHVLSLQAIIDGAKRQRKPVNLVFLDVRKAFDSVSHDTIVLAMRRLGCPDPFLSYIRDLYSRSSTVIEHNGERSAPIFTRRGVKQGDPLSPFMFNAVIDWAFSSLDDHVGFSFGHVRVNNLGYADDVALLSDTRAGLRSQLGKFESHLAKGGLTISAGTEGKSSSLSIVVDGKAKRWVVDQTPFLATNEGIIPSLSASGEYRYLGIMLGSGGAKVRSSLREELLQGLQNITRAPLKPYQRMRILRNFLLPKYLHELVLAPVADGWLNWLDTAIRANVRQWLKLPQDTPVAFIHAGTGDGGLSVPSLRYSVPVMRRKRLEAVHSATDPLSTALTASPFFQKELSGLSRKTLGGRLVTDKQSLAQAWAGCLYTKVDGRGLSEARSCAEGSRWVSNPPRNQSGANYIGAIKARGGLLYSKVRSARGDSGRDVRCDSCMRPETAQHIIQVCPRTSGPRMRRHDRVVQFVSAAAERAGYKVLVEPRIVGRTLGVRKPDLVLWNESRAYVADVTITSDQVGGVKAHRDKVAYYDQPEIREWVERFTGLSHISFSAVAANWRGVLSPLSADFLKSVLKLSNWDISLLGLRICEETYHIHRYFGRSTYRVRGRGPS

SEQ ID NO: 2208 - protein, 1035 aa, synthetic construct
  source 1..1035: note = MG140-74_I389A
MFACGQCERTFGNKGALGNHCKWKHAQTRLPERTNGGEFPCPDCDNAYGSSGGLNVHRRARHPDVYHAARQPAARVKARWSYEELVLVARAELEIRGTNPPQGVVRVLHSRFPDRTFEAIKCLRNKNPRYKEVLAALEVEEVDEGLPTVTPSEQTHAFAQADGLWRDQLRMAINIEHLGVDDLDWVADGCPAEDIRKKLDELFASWVGHLVRGERAPARSHQPAAGVTNPSRELDPRRRRRAQYSAIQHLYGRKPSAAAHKVLDGSWECGDPVPTPTLEDFRMAWQPIFETPSIKDNRRPTCVGQVRWEIVSPVTPGELEKVLTEGASSAPGPDGVKLKDVIGLGIGELCSHFNLWLLCGSQPSAMCVGRTIYIPKGSESNDALKYRPATIASHILRVFHKIMARRFDAFLPLKYTQKGFRSGDGIAQHVLSLQAIIDGAKRQRKPVNLVFLDVRKAFDSVSHDTIVLAMRRLGCPDPFLSYIRDLYSRSSTVIEHNGERSAPIFTRRGVKQGDPLSPFMFNAVIDWAFSSLDDHVGFSFGHVRVNNLGYADDVALLSDTRAGLRSQLGKFESHLAKGGLTISAGTEGKSSSLSIVVDGKAKRWVVDQTPFLATNEGIIPSLSASGEYRYLGIMLGSGGAKVRSSLREELLQGLQNITRAPLKPYQRMRILRNFLLPKYLHELVLAPVADGWLNWLDTAIRANVRQWLKLPQDTPVAFIHAGTGDGGLSVPSLRYSVPVMRRKRLEAVHSATDPLSTALTASPFFQKELSGLSRKTLGGRLVTDKQSLAQAWAGCLYTKVDGRGLSEARSCAEGSRWVSNPPRNQSGANYIGAIKARGGLLYSKVRSARGDSGRDVRCDSCMRPETAQHIIQVCPRTSGPRMRRHDRVVQFVSAAAERAGYKVLVEPRIVGRTLGVRKPDLVLWNESRAYVADVTITSDQVGGVKAHRDKVAYYDQPEIREWVERFTGLSHISFSAVAANWRGVLSPLSADFLKSVLKLSNWDISLLGLRICEETYHIHRYFGRSTYRVRGRGPS

SEQ ID NO: 2209 - protein, 1035 aa, synthetic construct
  source 1..1035: note = MG140-74_R397A
MFACGQCERTFGNKGALGNHCKWKHAQTRLPERTNGGEFPCPDCDNAYGSSGGLNVHRRARHPDVYHAARQPAARVKARWSYEELVLVARAELEIRGTNPPQGVVRVLHSRFPDRTFEAIKCLRNKNPRYKEVLAALEVEEVDEGLPTVTPSEQTHAFAQADGLWRDQLRMAINIEHLGVDDLDWVADGCPAEDIRKKLDELFASWVGHLVRGERAPARSHQPAAGVTNPSRELDPRRRRRAQYSAIQHLYGRKPSAAAHKVLDGSWECGDPVPTPTLEDFRMAWQPIFETPSIKDNRRPTCVGQVRWEIVSPVTPGELEKVLTEGASSAPGPDGVKLKDVIGLGIGELCSHFNLWLLCGSQPSAMCVGRTIYIPKGSESNDALKYRPITIASHILAVFHKIMARRFDAFLPLKYTQKGFRSGDGIAQHVLSLQAIIDGAKRQRKPVNLVFLDVRKAFDSVSHDTIVLAMRRLGCPDPFLSYIRDLYSRSSTVIEHNGERSAPIFTRRGVKQGDPLSPFMFNAVIDWAFSSLDDHVGFSFGHVRVNNLGYADDVALLSDTRAGLRSQLGKFESHLAKGGLTISAGTEGKSSSLSIVVDGKAKRWVVDQTPFLATNEGIIPSLSASGEYRYLGIMLGSGGAKVRSSLREELLQGLQNITRAPLKPYQRMRILRNFLLPKYLHELVLAPVADGWLNWLDTAIRANVRQWLKLPQDTPVAFIHAGTGDGGLSVPSLRYSVPVMRRKRLEAVHSATDPLSTALTASPFFQKELSGLSRKTLGGRLVTDKQSLAQAWAGCLYTKVDGRGLSEARSCAEGSRWVSNPPRNQSGANYIGAIKARGGLLYSKVRSARGDSGRDVRCDSCMRPETAQHIIQVCPRTSGPRMRRHDRVVQFVSAAAERAGYKVLVEPRIVGRTLGVRKPDLVLWNESRAYVADVTITSDQVGGVKAHRDKVAYYDQPEIREWVERFTGLSHISFSAVAANWRGVLSPLSADFLKSVLKLSNWDISLLGLRICEETYHIHRYFGRSTYRVRGRGPS

SEQ ID NO: 2210 - protein, 1035 aa, synthetic construct
  source 1..1035: note = MG140-74_F458G
MFACGQCERTFGNKGALGNHCKWKHAQTRLPERTNGGEFPCPDCDNAYGSSGGLNVHRRARHPDVYHAARQPAARVKARWSYEELVLVARAELEIRGTNPPQGVVRVLHSRFPDRTFEAIKCLRNKNPRYKEVLAALEVEEVDEGLPTVTPSEQTHAFAQADGLWRDQLRMAINIEHLGVDDLDWVADGCPAEDIRKKLDELFASWVGHLVRGERAPARSHQPAAGVTNPSRELDPRRRRRAQYSAIQHLYGRKPSAAAHKVLDGSWECGDPVPTPTLEDFRMAWQPIFETPSIKDNRRPTCVGQVRWEIVSPVTPGELEKVLTEGASSAPGPDGVKLKDVIGLGIGELCSHFNLWLLCGSQPSAMCVGRTIYIPKGSESNDALKYRPITIASHILRVFHKIMARRFDAFLPLKYTQKGFRSGDGIAQHVLSLQAIIDGAKRQRKPVNLVFLDVRKAGDSVSHDTIVLAMRRLGCPDPFLSYIRDLYSRSSTVIEHNGERSAPIFTRRGVKQGDPLSPFMFNAVIDWAFSSLDDHVGFSFGHVRVNNLGYADDVALLSDTRAGLRSQLGKFESHLAKGGLTISAGTEGKSSSLSIVVDGKAKRWVVDQTPFLATNEGIIPSLSASGEYRYLGIMLGSGGAKVRSSLREELLQGLQNITRAPLKPYQRMRILRNFLLPKYLHELVLAPVADGWLNWLDTAIRANVRQWLKLPQDTPVAFIHAGTGDGGLSVPSLRYSVPVMRRKRLEAVHSATDPLSTALTASPFFQKELSGLSRKTLGGRLVTDKQSLAQAWAGCLYTKVDGRGLSEARSCAEGSRWVSNPPRNQSGANYIGAIKARGGLLYSKVRSARGDSGRDVRCDSCMRPETAQHIIQVCPRTSGPRMRRHDRVVQFVSAAAERAGYKVLVEPRIVGRTLGVRKPDLVLWNESRAYVADVTITSDQVGGVKAHRDKVAYYDQPEIREWVERFTGLSHISFSAVAANWRGVLSPLSADFLKSVLKLSNWDISLLGLRICEETYHIHRYFGRSTYRVRGRGPS

SEQ ID NO: 2211 - RNA, 25 nt, synthetic construct
  source 1..25: mol_type = other RNA; note = MG140-3_5UTR_25bp
cgaggtgtccctatccaccatcggg

SEQ ID NO: 2212 - RNA, 145 nt, synthetic construct
  source 1..145: mol_type = other RNA; note = MG140-3_5UTR_145bp
cgaggtgtccctatccaccatcgggtttcagaaatcttccgaggacaacgtccgagtgctggctgtctggtctgtatgacttgggccaatcggtaaccgatagccgatcctccctgagggcaccacgttgcagccggtaactaca

SEQ ID NO: 2213 - RNA, 50 nt, synthetic construct
  source 1..50: mol_type = other RNA; note = MG140-3_18S_50bp
aagtttttggattccggggggagtatggttgcaaagctgaaacttaaagg

SEQ ID NO: 2214 - RNA, 65 nt, synthetic construct
  source 1..65: mol_type = other RNA; note = MG140-3_18S_50bp_5UTR_15bp
aagtttttggattccggggggagtatggttgcaaagctgaaacttaaaggcgaggtgtccctatc

SEQ ID NO: 2215 - RNA, 75 nt, synthetic construct
  source 1..75: mol_type = other RNA; note = MG140-3_18S_50bp_5UTR_25bp
aagtttttggattccggggggagtatggttgcaaagctgaaacttaaaggcgaggtgtccctatccaccatcggg

SEQ ID NO: 2216 - RNA, 195 nt, synthetic construct
  source 1..195: mol_type = other RNA; note = MG140-3_18S_50bp_5UTR_145bp
aagtttttggattccggggggagtatggttgcaaagctgaaacttaaaggcgaggtgtccctatccaccatcgggtttcagaaatcttccgaggacaacgtccgagtgctggctgtctggtctgtatgacttgggccaatcggtaaccgatagccgatcctccctgagggcaccacgttgcagccggtaactaca

SEQ ID NO: 2217 - RNA, 40 nt, synthetic construct
  source 1..40: mol_type = other RNA; note = MG140-8_5UTR_40bp
ggcggagtaaggagccgtgttccgacgttgtgaaggctcc

SEQ ID NO: 2218 - RNA, 85 nt, synthetic construct
  source 1..85: mol_type = other RNA; note = MG140-8_5UTR_85bp
ggcggagtaaggagccgtgttccgacgttgtgaaggctccacaaattagcccgtggcaaactccgcggtaggcagggctccgtga

SEQ ID NO: 2219 - RNA, 50 nt, synthetic construct
  source 1..50: mol_type = other RNA; note = MG140-8_18S_50bp
aagtttttgggttccgggggaagtatggttgcaaagccgaaacttaaagg

SEQ ID NO: 2220 - RNA, 65 nt, synthetic construct
  source 1..65: mol_type = other RNA; note = MG140-8_18S_50bp_5UTR_15bp
aagtttttgggttccgggggaagtatggttgcaaagccgaaacttaaaggggcggagtaaggagc

SEQ ID NO: 2221 - RNA, 45 nt, synthetic construct
  source 1..45: mol_type = other RNA; note = MG140-74_5UTR_45bp
acaaagcattgcgatggctggtgactggtgttgacgcaatgtgat

SEQ ID NO: 2222 - RNA, 115 nt, synthetic construct
  source 1..115: mol_type = other RNA; note = MG140-74_5UTR_115bp
acaaagcattgcgatggctggtgactggtgttgacgcaatgtgatttctgcccagtgctctgaatgtcaaagtgaagtaattcatccaagcgcgggtaaacggcgggagtaacta

SEQ ID NO: 2223 - RNA, 50 nt, synthetic construct
  source 1..50: mol_type = other RNA; note = MG140-74_28S_50bp
attcatccaagcgcgggtaaacggcgggagtaactatgactctcttaagg

SEQ ID NO: 2224 - RNA, 65 nt, synthetic construct
  source 1..65: mol_type = other RNA; note = MG140-74_28S_50bp_5UTR_15bp
attcatccaagcgcgggtaaacggcgggagtaactatgactctcttaaggacaaagcattgcgat

SEQ ID NO: 2225 - RNA, 95 nt, synthetic construct
  source 1..95: mol_type = other RNA; note = MG140-74_28S_50bp_5UTR_45bp
attcatccaagcgcgggtaaacggcgggagtaactatgactctcttaaggacaaagcattgcgatggctggtgactggtgttgacgcaatgtgat

SEQ ID NO: 2226 - RNA, 165 nt, synthetic construct
  source 1..165: mol_type = other RNA; note = MG140-74_28S_50bp_5UTR_115bp
attcatccaagcgcgggtaaacggcgggagtaactatgactctcttaaggacaaagcattgcgatggctggtgactggtgttgacgcaatgtgatttctgcccagtgctctgaatgtcaaagtgaagtaattcatccaagcgcgggtaaacggcgggagtaacta

SEQ ID NO: 2227 - RNA, 33 nt, synthetic construct
  source 1..33: mol_type = other RNA; note = MG140-88_5UTR_33bp
gcgccactcgcggcgtacgcacgcgtcggcacg

SEQ ID NO: 2228 - RNA, 85 nt, synthetic construct
  source 1..85: mol_type = other RNA; note = MG140-88_5UTR_85bp
gcgccactcgcggcgtacgcacgcgtcggcacgcgctccgcagttttccgcgtttcttcgcggaaattcacgacgcagcgctctc

SEQ ID NO: 2229 - RNA, 50 nt, synthetic construct
  source 1..50: mol_type = other RNA; note = MG140-88_28S_50bp
attcaagcaagcgcgggtaaacggcgggagtaactatgactttcttaagg

SEQ ID NO: 2230 - RNA, 65 nt, synthetic construct
  source 1..65: mol_type = other RNA; note = MG140-88_28S_50bp_5UTR_15bp
attcaagcaagcgcgggtaaacggcgggagtaactatgactttcttaagggcgccactcgcggcg

SEQ ID NO: 2231 - RNA, 186 nt, synthetic construct
  source 1..186: mol_type = other RNA; note = MG140-89 3' UTR
aactcctgacaaattgtcagaaagctagtaataggaaaggacagacccaaggaggcccggagcaaatacagggcgccaacagcatccgctcggctaccctctagcacggcccccccataaacacgggcgaccacacccaaaaatatcgtggaaagtgtagagatcctctgcgatccctatagaata

SEQ ID NO: 2232 - RNA, 2566 nt, synthetic construct
  source 1..2566: mol_type = other RNA; note = MG140-89 5' UTR
cccgtggatggatgacttgtcctaccagaacgccgccaatttttcaattcgtaccttacgatttgaaaaactttgtgcggacagagaacagccatggcagtgtctttcgctttcctaccaaaatgccgtcaaaaatttcgatttaagcggctagcgactgactttatactgcatggtcgtaccagaaatttcgctgtcctaccagaacgccgccaatttttcaattcgtaccttacgattttgataaacattgtgcggacagagaacagccatgcagtgtctttcgccttcctaccaaaatgccgtcaaaaatttcgatttaagcggctagcgattgactttatactgcatggtcgtaccagaaattttgttttcgaccaagcatccaaaccacaaaagattgcaaagatgactctcttaagagagctttaagactatcggttctgctcgatagggtggaaatactctgtcgagtaagcgaaaaaggcgtgaatgtacacacattagcgaacataaagcctctcacgctcaagtgccaacctcaccttccagcggtgctccccgttgacggccactggtcacggacgaggcaaatggcgaccgaaatacggggcgggatatccctacggtcatgatgcgaacatatagcctctctgacacatgtcaacatttgttggcgaccgagtataggcggtataaccttagtgtacacttgaacgctcacgagtacctcgatgaatcgggggaaagcatggtatccctgtccggcttgcgttgcagcggcggtgcagtggcaaatgcgcgagttatttggaccaccatatcctagagcatttagggaagatgggcatcttcggatgcctcgcactcccgggggcgtctcacagacgcaccttgagcgcatatactgcctcgctgcctttaaccgcccggacacaagcgccgggactcaataggctttcgtgtatcagcaaacggtgcgctttggccaccgactggcggaacacgtagcctgaaaaaatgcagataccaatcacttgaacgctcacgagtaccttgataaatcaggggaaagcaaacataaacatctagcgaggctgcggcccacttgatgtgtaacacttgaacgctcacgagtaatccgttctttcggatgaaagcatggtatttctgtccggcttgcgttgcagcggcggtgcagtggcaaatgcgcgagttatttggaccaccatatcctagagcatttagggaagatgggcttcttcggaagcctcgcactcccgggggcgtcccacgggcgcaccttgagcgcatatactgcctcgctgcctttaaccgcccggacacaagcgccgggactcgacaggctttcgtgtatcagcaacgggtgcgctttggccacccactggcagaacacgtagcccaaaaataccagtcacttgaacgctcacgagtactccgattaatcggacgaaagcaaacacggagtatatttgtccagcctgtgttgcagcagcgacaagttgaggcgcacctaaagcatttatgcttccttgctgccttaacccgcgcgcacataggtgctgggacttgaagggtcttcgcgtatcagccgcgcgcgcactgccgccgcgagcagagacacgttacctataatacccgtcgtgcgctcatcacgcatactcttcttcaagggtatgcaagagaggcacgtaaaatttgtccggtttgtggtgccgatcgcgctgccttgagccgcacgcacacgaacgtcgggactaacgggggctttcgcgcatcagccgcgcgcgggcatcggccgccgctggcgtaagcacgtagccttattatatccccatgcagaattgagagcgaaacgatgcaagcatcgagtggccactaggggcgataaacaacacaggccatgttagcgaaaacggttgactttgaaaccagagctgtagtctctccttcagtagctccgaggtgaaatgtatccgaaggcttttgttgcttgaagagggggatgcatgcaaaggtgataaaaaggattccgtcggaactttcatgcctgtcaaacaaagaggctggggcacaagccaagctcgctgcccaaagaacatagttctcaaataatgccccagcccaggccactactttcaatctcacaaagagcttctagagtctcaagactcagcaaaacagaaagttagcccggccatgccgcggccaacacttacatacgttgaggctcgaacgtagtctaccaccgactaaatttaaaacggggcgcagtacccgggcaaacagtttccacgctgtgtctcggcgttcttaaacccctgttaaggggattcgattcgtcaaaagcggtcgaaacccctgggcgtatgccaaaaaggactctcactatcgaaaccaccacttggcaacgtacccggcatgccccctcggtatagctggtgccggggggcgctatcgaaaaggagtacggttcaacccggccgtactataaacctcagttagggtgaatggggggccccaccgcagtgggcaataaacaagt

SEQ ID NO: 2233 - RNA, 102 nt, synthetic construct
  source 1..102: mol_type = other RNA; note = MG153-5_3UTR
ttgaaccgccgtgtaccgaacggttcgcacggtggtgtgagaggtcggaaatttctcgttacgagaaatttcctcctactcgattgtccaaaggaggtattt

SEQ ID NO: 2234 - RNA, 525 nt, synthetic construct
  source 1..525: mol_type = other RNA; note = MG153-5_5RNA
caacaaaacattacggaaagcatctatcttcggataggtgctttttctagttcgcgcgccatgggcgcgctctaacgggtgaaagtcccgaacacgcctaggcaacgaggaagtgtatagctgaacagcaagggtgtccatcgtgaggtggaatctgaaggaagctgtaggcaaacccttggtccgacgaacaggaaccacatataaggctcggaaatacggataagtctgctagaagagatgaagtccaaaagttgtcggaagtacgagtaaatgtggcggatagatgaggggaaagagcgagcaccttaagcgtggaggtctcacagcggtttcattagccgagtaacaacgaactgtgagaagtcagcagaccccatagtagcgaggaagtttctgtaatggaaatggagtgaaggggggaacaatcaatcagttgaagtacgttccacttcgtagtcaaagcaacgtctgtcgataacgtcaaaggcggcaacgaccaaaggggcagaaaggaaacaacgc

SEQ ID NO: 2235 - RNA, 102 nt, synthetic construct
  source 1..102: mol_type = other RNA; note = MG153-5_loop1
gagtgaaggggggaacaatcaatcagttgaagtacgttccacttcgtagtcaaagcaacgtctgtcgataacgtcaaaggcggcaacgaccaaaggggcaga

SEQ ID NO: 2236 - RNA, 68 nt, synthetic construct
  source 1..68: mol_type = other RNA; note = MG153-5_loop2
acgttccacttcgtagtcaaagcaacgtctgtcgataacgtcaaaggcggcaacgaccaaaggggcag

SEQ ID NO: 2237 - RNA, 42 nt, synthetic construct
  source 1..42: mol_type = other RNA; note = MG153-5_loop3
tctgtcgataacgtcaaaggcggcaacgaccaaaggggcaga

SEQ ID NO: 2238 - RNA, 245 nt, synthetic construct
  source 1..245: mol_type = other RNA; note = MG153-18_3RNA
tgaaccgccggatgcggacccgcatgtccggtggtgtgagaggacgggggctagccgccccctcctactcgatgcgcccggtatgggtgaacgccgtgcggtgaaagcctgtcccctatcctgataatacgcctgataagttttgcgtttgattgacatatatccggttttctgctaatgttatatatgaacaaaagataagcacagccgaaaaacggaataaaattatacagggggtcatacat

SEQ ID NO: 2239 - RNA, 456 nt, synthetic construct
  source 1..456: mol_type = other RNA; note = MG153-18_5RNA
attcaaatcaataaagagctggtcataatgaccagctctttacttatgcgtgcgcccggcatgggcgttaacttggtggtgaaagtccactgcaggcgaggcagcacgagtctgctagccaaaggcaagggtgtccgtcgtgaggtggagtctgaaggaagccggcggcaaaaccacggcccgatgaacaagaaccccatacgaggctaagccgttcggatgagttggcacaacacaacgaaatcctaggctgccaagggacggcggagtatatggggcgggcgcggggtgaaggttaacgctcttacccggggaggcctgccagataagccaggtagagctggtaacctgtgtcggaaggcacggctgaactggcagaagtcagcagagggcatagtaccctggaggtcatgaacttcaggggaaggcccgaacatcaagtgagaggtgggaccg

SEQ ID NO: 2240 - RNA, 42 nt, synthetic construct
  source 1..42: mol_type = other RNA; note = MG153-18_loop1
gggcatagtaccctggaggtcatgaacttcaggggaaggccc

SEQ ID NO: 2241 - RNA, 105 nt, synthetic construct
  source 1..105: mol_type = other RNA; note = MG153-20_3RNA
tgcggacccgcatgctaggtggtgtggggggacgggggttagtcgccccctcctactcgattttccttggccaaggttacgcatgaccggtacaggggtgacagg

SEQ ID NO: 2242 - RNA, 535 nt, synthetic construct
  source 1..535: mol_type = other RNA; note = MG153-20_5RNA
tccaccaatccaggatgaaccaaaacaaactaaccccatgacttgccgaaaaccaagtggttttcggcagtttgttgtgcgcccggcatgagtgtggtctatagggtgaaagtcccgagcgggggctggcgagcgcctaccgttagccgagagcaagggtgtccatcgtgaggtggaatctgaaggaagcttaaggcaaacgcttgacctgaggtacacgaacccaattcgaggctagactagccggatgagtctgcaacacaagacgaagtcctaagccgccaagggctaatctggtagattgggcaggtacatgagcggaaagtccacacccttacccggggaggtctgtacggaacgccatctgcagatggtaaccggtgtcgaaaggtgccgctgaacgtacagaagtcagcagaggccatagtaccttaacagggacgcctgaaaagggaagggccgaacgtcaactcaaggatgaatcagacgctttcgagaatcgatgtgttgaacgcagaattccggaaggaactgc

SEQ ID NO: 2243 - RNA, 42 nt, synthetic construct
  source 1..42: mol_type = other RNA; note = MG153-20_loop1
ggccatagtaccttaacagggacgcctgaaaagggaagggcc

SEQ ID NO: 2244 - RNA, 52 nt, synthetic construct
  source 1..52: mol_type = other RNA; note = MG153-20_loop2
acgtcaactcaaggatgaatcagacgctttcgagaatcgatgtgttgaacgc

SEQ ID NO: 2245 - RNA, 29 nt, synthetic construct
  source 1..29: mol_type = other RNA; note = MG153-20_loop3
tcagacgctttcgagaatcgatgtgttga

SEQ ID NO: 2246 - RNA, 39 nt, synthetic construct
  source 1..39: mol_type = other RNA; note = MG153-20_loop4
ctttcgagaatcgatgtgttgaacgcagaattccggaag

SEQ ID NO: 2247 - RNA, 131 nt, synthetic construct
  source 1..131: mol_type = other RNA; note = MG153-51_3RNA
gctgctggaggagccgtgtacgcggcccgtacgcacggttctgtgagaggggcggttaccccgcccctactcgatttgcggtcctggctatgtgtatcttgagaactctgtctctgtggtgctccccccgc

SEQ ID NO: 2248 - RNA, 834 nt, synthetic construct
  source 1..834: mol_type = other RNA; note = MG153-51_5RNA
atatccccgcccccgccgctggacctacttacagcaacagggacggcccccgcgccgtccctgcctgtcgtacgcctggcaatcagtatcgctaaggggttagagtccccgacgcaccggactcagacggaagcgttagtgaacaggcactgcgtcgccgtgaggcggggtggggagggcctgggagcaaacctcggaacgaagcgcaagcgaaccagtgttggcggggtcccgggggcgacctggcgacagacagggaagcccaattactgaggaagcaccgggatagcgttaggatggtcggcttcgaggggaagcgatattgacgatccagggaggcctgccatggtccaagacccggtgttcatgtcatgaatggccgaagagccgggatggggtaatcggcggcaaggggcggcccaagcagccggtgatgccgtggcaggagtcagacgacccggtagtagtgattaagcccaggccgaagaaccccggcaacgggcgggaggggaaaacctggacgaccgccgtcttggtacggcggcggccgctggaccccaaaaggccagtggtcaggcgaagcggggaaccagcaggcaaatggtggaggatacggtacaccgagcgcgggatagagggacagcaaacctaacggggcgcaccgagaggcaccagcccaccgaaggcgggaggccgcctcaggtcagagggcgccgtccccgacctgagtactcacccggctaatacgttgtgcagcaacgacggtagccgaggaacggggaaggaacaggccgcgcggcgggcaaggccgggtccaagacgccaacgacgacg

SEQ ID NO: 2249 - RNA, 38 nt, synthetic construct
  source 1..38: mol_type = other RNA; note = MG153-51_loop1
gcccaccgaaggcgggaggccgcctcaggtcagagggc

SEQ ID NO: 2250 - RNA, 72 nt, synthetic construct
  source 1..72: mol_type = other RNA; note = MG153-51_loop2
ccgtccccgacctgagtactcacccggctaatacgttgtgcagcaacgacggtagccgaggaacggggaagg

SEQ ID NO: 2251 - RNA, 316 nt, synthetic construct
  source 1..316: mol_type = other RNA; note = MG153-82_3RNA
cctcaacctgacgaaccgcccggtgcggacccgcatgccgggtggtgtgggaggggacgccggggagacccggcgcccctatcccgattccggccccttcgccatcctggctacggggcctccaggacaccccggtctcggcaggatgtgcggatccaagtcgaacagcagtatgggcatgggcggggacaatttcgaagtcagaagctcaatcaaaggcggtcggtgccgataacgggagggaacagttcccggtccaccgcttgcaacgtggcgagatgggacccgattgcgacttctagcggaggagtctgcc

SEQ ID NO: 2252 - RNA, 392 nt, synthetic construct
  source 1..392: mol_type = other RNA; note = MG153-82_5RNA
gggcgcgatcctggaggtgcaagtcctcccgtaagttggccacaacgagcgaagcgaagcgcaagggcggaagggcgaccgaccgtctggaggaagcgtggagcgtaaaccgcgagccgagggacacgaaccacatctgaggcgttgccggccagggcgagcaggcaggtgactgcgaagctctcgtggccaagggccaggcggcgtaaatgtggcggttgtgcggtgaaggatcgcgttcttacctggggagatctcgccttgcgcctgaaagggcgacgtcgcgtcagcggcggagcgagaagtcagccgaggccgtagtaggaggccgcagggccgccgaagggccgaacgtcaggaagggcaagacgcccggaggtctcgataccgtc

SEQ ID NO: 2253 - RNA, 58 nt, synthetic construct
  source 1..58: mol_type = other RNA; note = MG153-82_loop1
gccttgcgcctgaaagggcgacgtcgcgtcagcggcggagcgagaagtcagccgaggc

SEQ ID NO: 2254 - RNA, 36 nt, synthetic construct
  source 1..36: mol_type = other RNA; note = MG153-82_loop2
ggccgtagtaggaggccgcagggccgccgaagggcc

SEQ ID NO: 2255 - RNA, 61 nt, synthetic construct
  source 1..61: mol_type = other RNA; note = MG153-18 D4a loop 1
gggcatagtaccctggaggtcatgaacttcaggggaaggcccgaacatcaagtgagaggtg

SEQ ID NO: 2256 - RNA, 69 nt, synthetic construct
  source 1..69: mol_type = other RNA; note = MG153-18 D4a loop 2
gcatagtaccctggaggtcatgaacttcaggggaaggcccgaacatcaagtgagaggtgggaccgatgc

SEQ ID NO: 2257 - RNA, 113 nt, synthetic construct
  source 1..113: mol_type = other RNA; note = MG153-51 D4a loop 1
gccgaggaacggggaaggaacaggccgcgcggcgggcaaggccgggtccaagacgccaacgacgacgatgggggacaccatgacgaaaaggaagcaccactccctctatgggc

SEQ ID NO: 2258 - protein, 317 aa, unidentified; identical to SEQ ID NO: 1833
  source 1..317: note = MG157-6 reverse transcriptase

SEQ ID NO: 2259 - protein, 324 aa, unidentified; identical to SEQ ID NO: 1834
  source 1..324: note = MG157-7 reverse transcriptase

SEQ ID NO: 2260 - protein, 291 aa, unidentified; identical to SEQ ID NO: 1835
  source 1..291: note = MG157-8 reverse transcriptase

SEQ ID NO: 2261 - protein, 295 aa, unidentified; identical to SEQ ID NO: 1836
  source 1..295: note = MG157-9 reverse transcriptase

SEQ ID NO: 2262 - protein, 324 aa, unidentified; identical to SEQ ID NO: 1837
  source 1..324: note = MG157-10 reverse transcriptase

SEQ ID NO: 2263 - protein, 303 aa, unidentified; identical to SEQ ID NO: 1838
  source 1..303: note = MG157-11 reverse transcriptase

SEQ ID NO: 2264 - protein, 309 aa, unidentified; identical to SEQ ID NO: 1839
  source 1..309: note = MG157-12 reverse transcriptase

SEQ ID NO: 2265 - protein, 291 aa, unidentified; identical to SEQ ID NO: 1840
  source 1..291: note = MG157-13 reverse transcriptase

SEQ ID NO: 2266 - protein, 298 aa, unidentified; identical to SEQ ID NO: 1841
  source 1..298: note = MG157-14 reverse transcriptase

SEQ ID NO: 2267 - protein, 4 aa, synthetic construct
CAQQ

SEQ ID NO: 2268 - protein, 10 aa, synthetic construct
  VARIANT 2..4: note = Any amino acid
  VARIANT 6: note = V or L
  VARIANT 7..8: note = Any amino acid
GXXXYXXXVN

SEQ ID NO: 2269 - protein, 4 aa, synthetic construct
YADD

SEQ ID NO: 2270 - protein, 4 aa, synthetic construct
YIDD

SEQ ID NO: 2271 - protein, 6 aa, synthetic construct
HHHHHH

SEQ ID NO: 2272 - DNA, 291 bp, synthetic construct
  source 1..291: mol_type = other DNA
tcggactcagaagtcaatcaagaagctaagccagaggtcaagccagaagtcaagcctgagactcacatcaatttaaaggtgtccgatggatcttcagagatcttcttcaagatcaaaaagaccactcctttaagaaggctgatggaagcgttcgctaaaagacagggtaaggaaatggactccttaagattcttgtacgacggtattagaattcaagctgatcagacccctgaagatttggacatggaggataacgatattattgaggctcacagagaacagattggtgga

SEQ ID NO: 2273 - protein, 8 aa, synthetic construct
SGSGGSGS

SEQ ID NO: 2274 - protein, 8 aa, synthetic construct
LEVLFQGP

SEQ ID NO: 2275 - protein, 10 aa, synthetic construct
  VARIANT 2..4: note = Any amino acid
  VARIANT 7..8: note = Any amino acid
GXXXYVXXVN

What is claimed is:

1. An engineered retrotransposase system, comprising:
(a) a double-stranded nucleic acid comprising a cargo nucleotide sequence configured to form a complex with a retrotransposase; and
(b) a retrotransposase configured to transpose the cargo nucleotide sequence to a target nucleic acid sequence and comprising an amino acid sequence having at least 75% sequence identity to any one of SEQ ID NOs: 1-29, 393-735, 799-895, 1020-1476, 1544-1554, 1850-2160, 2165-2210, and 2258-2266.

2. The engineered retrotransposase system of claim 1, wherein the retrotransposase comprises an amino acid sequence having at least 80% sequence identity to any one of SEQ ID NOs: 1-29, 393-735, 799-895, 1020-1476, 1544-1554, 1850-2160, 2165-2210, and 2258-2266.

3. The engineered retrotransposase system of claim 1, wherein the retrotransposase comprises an amino acid sequence having at least 90% sequence identity to any one of SEQ ID NOs: 1-29, 393-735, 799-895, 1020-1476, 1544-1554, 1850-2160, 2165-2210, and 2258-2266.

4. The engineered retrotransposase system of claim 1, wherein the retrotransposase comprises an amino acid sequence having at least 95% sequence identity to any one of SEQ ID NOs: 1-29, 393-735, 799-895, 1020-1476, 1544-1554, 1850-2160, 2165-2210, and 2258-2266.

5. The engineered retrotransposase system of claim 1, wherein the retrotransposase is encoded by a nucleic acid having at least 75% sequence identity to any one of SEQ ID NOs: 120-173, 181-187, 193-197, 203-207, 217-225, 231-235, 241-245, 251-255, 267-277, 288-297, 303-307, 324-339, 964-981, 1003-1019, 1504-1520, 1521-1536, 1539-1543, 1556-1568, and 1611-1806.

6. The engineered retrotransposase system of claim 1, wherein the retrotransposase is encoded by a nucleic acid sequence having at least 80% sequence identity to any one of SEQ ID NOs: 120-173, 181-187, 193-197, 203-207, 217-225, 231-235, 241-245, 251-255, 267-277, 288-297, 303-307, 324-339, 964-981, 1003-1019, 1504-1520, 1521-1536, 1539-1543, 1556-1568, and 1611-1806.

7. The engineered retrotransposase system of claim 1, wherein retrotransposase is encoded by a nucleic acid sequence having at least 90% sequence identity to any one of SEQ ID NOs: 120-173, 181-187, 193-197, 203-207, 217-225, 231-235, 241-245, 251-255, 267-277, 288-297, 303-307, 324-339, 964-981, 1003-1019, 1504-1520, 1521-1536, 1539-1543, 1556-1568, and 1611-1806.

8. The engineered retrotransposase system of claim 1, wherein retrotransposase is encoded by a nucleic acid sequence having at least 95% sequence identity to any one of SEQ ID NOs: 120-173, 181-187, 193-197, 203-207, 217-225, 231-235, 241-245, 251-255, 267-277, 288-297, 303-307, 324-339, 964-981, 1003-1019, 1504-1520, 1521-1536, 1539-1543, 1556-1568, and 1611-1806.

9. The engineered retrotransposase system of any one of claims 1-8, wherein the double-stranded nucleic acid comprises a 5′ recognition sequence comprising a GG nucleotide sequence and a 3′ recognition sequence comprising a TGAC nucleotide sequence.

10. The engineered retrotransposase system of claim 9, wherein the 5′ recognition sequence and the 3′ recognition sequence are configured to interact with the retrotransposase.

11. The engineered retrotransposase system of any one of claims 1-10, wherein the double-stranded nucleic acid comprising a cargo nucleotide sequence is RNA.

12. The engineered retrotransposase system of claim 11, wherein the RNA is an in vitro transcribed RNA.

13. The engineered retrotransposase system of any one of claims 11-12, wherein the RNA comprises a sequence 5′ to the cargo sequence or a sequence 3′ to the cargo sequence that has at least 80% sequence identity to an RNA cognate of any one of SEQ ID NOs: 761-798, 2161-2164, and 2211-2257, a complement thereof, or a reverse complement thereof.

14. An engineered retrotransposase system, comprising:
(a) a double-stranded nucleic acid comprising a cargo nucleotide sequence configured to form a complex with a retrotransposase; and
(b) a retrotransposase configured to transpose the cargo nucleotide sequence to a target nucleic acid sequence and comprising an amino acid sequence having at least 75% sequence identity to any one of SEQ ID NOs: 1-29, 393-401, 799-894, 1476, 1850-1926, and 2165-2210.

15. The engineered retrotransposase system of claim 14, wherein the retrotransposase is encoded by a nucleic acid sequence having at least 80% sequence identity to any one of SEQ ID NOs: SEQ ID NOs: 1535-1536, 1542-1543, 1611-1623, 1663-1691, and 1786-1806.

16. An engineered retrotransposase system, comprising:
(a) a double-stranded nucleic acid comprising a cargo nucleotide sequence configured to form a complex with a retrotransposase; and
(b) a retrotransposase configured to transpose the cargo nucleotide sequence to a target nucleic acid sequence and comprising an amino acid sequence having at least 75% sequence identity to SEQ ID NO: 402 or SEQ ID NO: 895.

17. An engineered retrotransposase system, comprising:
(a) a double-stranded nucleic acid comprising a cargo nucleotide sequence configured to form a complex with a retrotransposase; and
(b) a retrotransposase configured to transpose the cargo nucleotide sequence to a target nucleic acid sequence and comprising an amino acid sequence having at least 75% sequence identity to SEQ ID NO: 388.

18. An engineered retrotransposase system, comprising:
(a) a double-stranded nucleic acid comprising a cargo nucleotide sequence configured to form a complex with a retrotransposase; and
(b) a retrotransposase configured to transpose the cargo nucleotide sequence to a target nucleic acid sequence and comprising an amino acid sequence having at least 75% sequence identity to any one of SEQ ID NOs: 403-426.

19. The engineered retrotransposase system of claim 18, wherein the retrotransposase is encoded by a nucleic acid sequence having at least 80% sequence identity to any one of SEQ ID NOs: 389-392 and 1504-1507.

20. An engineered retrotransposase system, comprising:
(a) a double-stranded nucleic acid comprising a cargo nucleotide sequence configured to form a complex with a retrotransposase; and
(b) a retrotransposase configured to transpose the cargo nucleotide sequence to a target nucleic acid sequence and comprising an amino acid sequence having at least 75% sequence identity to any one of SEQ ID NOs: 427-439.

21. An engineered retrotransposase system, comprising:
(a) a double-stranded nucleic acid comprising a cargo nucleotide sequence configured to form a complex with a retrotransposase; and
(b) a retrotransposase configured to transpose the cargo nucleotide sequence to a target nucleic acid sequence and comprising an amino acid sequence having at least 75% sequence identity to any one of SEQ ID NOs: 440-554 and 1020-1037.

22. The engineered retrotransposase system of claim 21, wherein the retrotransposase is encoded by a nucleic acid sequence having at least 80% sequence identity to any one of SEQ ID NOs: 356-373, 964-981, and 1003-1019.

23. An engineered retrotransposase system, comprising:
(a) a double-stranded nucleic acid comprising a cargo nucleotide sequence configured to form a complex with a retrotransposase; and
(b) a retrotransposase configured to transpose the cargo nucleotide sequence to a target nucleic acid sequence and comprising an amino acid sequence having at least 75% sequence identity to any one of SEQ ID NOs: 555-608 and 1927-2010.

24. The engineered retrotransposase system of claim 23, wherein the retrotransposase is encoded by a nucleic acid sequence having at least 80% sequence identity to any one of SEQ ID NOs: 66-173, 740-756, 1521-1534, 1539-1541, 1624-1637, 1645-1662, and 1701-1782.

25. An engineered retrotransposase system, comprising:
(a) a double-stranded nucleic acid comprising a cargo nucleotide sequence configured to form a complex with a retrotransposase; and
(b) a retrotransposase configured to transpose the cargo nucleotide sequence to a target nucleic acid sequence and comprising an amino acid sequence having at least 75% sequence identity to any one of SEQ ID NOs: 609-610 and 1555.

26. The engineered retrotransposase system of claim 25, wherein the retrotransposase is encoded by a nucleic acid sequence having at least 80% sequence identity to any one of SEQ ID NOs: 308-309 and 324-325.

27. An engineered retrotransposase system, comprising:
(a) a double-stranded nucleic acid comprising a cargo nucleotide sequence configured to form a complex with a retrotransposase; and
(b) a retrotransposase configured to transpose the cargo nucleotide sequence to a target nucleic acid sequence and comprising an amino acid sequence having at least 75% sequence identity to any one of SEQ ID NOs: 611-615 and 1544-1545.

28. The engineered retrotransposase system of claim 27, wherein the retrotransposase is encoded by a nucleic acid sequence having at least 80% sequence identity to any one of SEQ ID NOs: 310-312, 326-328, 1556-1557, and 1569-1570.

29. An engineered retrotransposase system, comprising:
(a) a double-stranded nucleic acid comprising a cargo nucleotide sequence configured to form a complex with a retrotransposase; and
(b) a retrotransposase configured to transpose the cargo nucleotide sequence to a target nucleic acid sequence and comprising an amino acid sequence having at least 75% sequence identity to SEQ ID NO: 616 or SEQ ID NO: 617.

30. The engineered retrotransposase system of claim 29, wherein the retrotransposase is encoded by a nucleic acid sequence having at least 80% sequence identity to any one of SEQ ID NOs: 313-314 and 329-330.

31. An engineered retrotransposase system, comprising:
(a) a double-stranded nucleic acid comprising a cargo nucleotide sequence configured to form a complex with a retrotransposase; and
(b) a retrotransposase configured to transpose the cargo nucleotide sequence to a target nucleic acid sequence and comprising an amino acid sequence having at least 75% sequence identity to any one of SEQ ID NOs: 618-622 and 2258-2266.

32. The engineered retrotransposase system of claim 31, wherein the retrotransposase is encoded by a nucleic acid sequence having at least 80% sequence identity to any one of SEQ ID NOs: 315-319 and 331-335.

33. An engineered retrotransposase system, comprising:
(a) a double-stranded nucleic acid comprising a cargo nucleotide sequence configured to form a complex with a retrotransposase; and
(b) a retrotransposase configured to transpose the cargo nucleotide sequence to a target nucleic acid sequence and comprising an amino acid sequence having at least 75% sequence identity to SEQ ID NO: 623.

34. The engineered retrotransposase system of claim 33, wherein the retrotransposase is encoded by a nucleic acid sequence having at least 80% sequence identity to SEQ ID NO: 320 or SEQ ID NO: 336.

35. An engineered retrotransposase system, comprising:
(a) a double-stranded nucleic acid comprising a cargo nucleotide sequence configured to form a complex with a retrotransposase; and
(b) a retrotransposase configured to transpose the cargo nucleotide sequence to a target nucleic acid sequence and comprising an amino acid sequence having at least 75% sequence identity to any one of SEQ ID NOs: 624-626.

36. The engineered retrotransposase system of claim 35, wherein the retrotransposase is encoded by a nucleic acid sequence having at least 80% sequence identity to any one of SEQ ID NOs: 321-323, 337-339, and 1785.

37. An engineered retrotransposase system, comprising:
(a) a double-stranded nucleic acid comprising a cargo nucleotide sequence configured to form a complex with a retrotransposase; and
(b) a retrotransposase configured to transpose the cargo nucleotide sequence to a target nucleic acid sequence and comprising an amino acid sequence having at least 75% sequence identity to any one of SEQ ID NOs: 624-626.

38. The engineered retrotransposase system of claim 35, wherein the retrotransposase is encoded by a nucleic acid sequence having at least 80% sequence identity to any one of SEQ ID NOs: 321-323, 337-339, and 1785.

39. An engineered retrotransposase system, comprising:
(a) a double-stranded nucleic acid comprising a cargo nucleotide sequence configured to form a complex with a retrotransposase; and
(b) a retrotransposase configured to transpose the cargo nucleotide sequence to a target nucleic acid sequence and comprising an amino acid sequence having at least 75% sequence identity to any one of SEQ ID NOs: 627-673, 1039-1475, and 2011-2026.

40. The engineered retrotransposase system of claim 39, wherein the retrotransposase is encoded by a nucleic acid sequence having at least 80% sequence identity to any one of SEQ ID NOs: 174-187 and 1508-1520.

41. An engineered retrotransposase system, comprising:
(a) a double-stranded nucleic acid comprising a cargo nucleotide sequence configured to form a complex with a retrotransposase; and
(b) a retrotransposase configured to transpose the cargo nucleotide sequence to a target nucleic acid sequence and comprising an amino acid sequence having at least 75% sequence identity to any one of SEQ ID NOs: 674-678.

42. The engineered retrotransposase system of claim 41, wherein the retrotransposase is encoded by a nucleic acid sequence having at least 80% sequence identity to any one of SEQ ID NOs: 188-197.

43. An engineered retrotransposase system, comprising:
(a) a double-stranded nucleic acid comprising a cargo nucleotide sequence configured to form a complex with a retrotransposase; and
(b) a retrotransposase configured to transpose the cargo nucleotide sequence to a target nucleic acid sequence and comprising an amino acid sequence having at least 75% sequence identity to any one of SEQ ID NOs: 679-683.

44. The engineered retrotransposase system of claim 43, wherein the retrotransposase is encoded by a nucleic acid sequence having at least 80% sequence identity to any one of SEQ ID NOs: 198-207.

45. An engineered retrotransposase system, comprising:
(a) a double-stranded nucleic acid comprising a cargo nucleotide sequence configured to form a complex with a retrotransposase; and
(b) a retrotransposase configured to transpose the cargo nucleotide sequence to a target nucleic acid sequence and comprising an amino acid sequence having at least 75% sequence identity to any one of SEQ ID NOs: 684-692 and 2027-2046.

46. The engineered retrotransposase system of claim 45, wherein the retrotransposase is encoded by a nucleic acid sequence having at least 80% sequence identity to any one of SEQ ID NOs: 208-225 and 757-759.

47. An engineered retrotransposase system, comprising:
(a) a double-stranded nucleic acid comprising a cargo nucleotide sequence configured to form a complex with a retrotransposase; and
(b) a retrotransposase configured to transpose the cargo nucleotide sequence to a target nucleic acid sequence and comprising an amino acid sequence having at least 75% sequence identity to any one of SEQ ID NOs: 693-697 and 2047-2090.

48. The engineered retrotransposase system of claim 47, wherein the retrotransposase is encoded by a nucleic acid sequence having at least 80% sequence identity to any one of SEQ ID NOs: 226-235.

49. An engineered retrotransposase system, comprising:
(a) a double-stranded nucleic acid comprising a cargo nucleotide sequence configured to form a complex with a retrotransposase; and
(b) a retrotransposase configured to transpose the cargo nucleotide sequence to a target nucleic acid sequence and comprising an amino acid sequence having at least 75% sequence identity to any one of SEQ ID NOs: 698-702 and 2091-2119.

50. The engineered retrotransposase system of claim 49, wherein the retrotransposase is encoded by a nucleic acid sequence having at least 80% sequence identity to any one of SEQ ID NOs: 236-245 and 759-760.

51. An engineered retrotransposase system, comprising:
(a) a double-stranded nucleic acid comprising a cargo nucleotide sequence configured to form a complex with a retrotransposase; and
(b) a retrotransposase configured to transpose the cargo nucleotide sequence to a target nucleic acid sequence and comprising an amino acid sequence having at least 75% sequence identity to any one of SEQ ID NOs: 703-707.

52. The engineered retrotransposase system of claim 51, wherein the retrotransposase is encoded by a nucleic acid sequence having at least 80% sequence identity to any one of SEQ ID NOs: 246-255.

53. An engineered retrotransposase system, comprising:
(a) a double-stranded nucleic acid comprising a cargo nucleotide sequence configured to form a complex with a retrotransposase; and
(b) a retrotransposase configured to transpose the cargo nucleotide sequence to a target nucleic acid sequence and comprising an amino acid sequence having at least 75% sequence identity to any one of SEQ ID NOs: 708-718 and 2121-2159.

54. The engineered retrotransposase system of claim 53, wherein the retrotransposase is encoded by a nucleic acid sequence having at least 80% sequence identity to any one of SEQ ID NOs: 256-277, 1638-1644, and 1693-1700.

55. An engineered retrotransposase system, comprising:
(a) a double-stranded nucleic acid comprising a cargo nucleotide sequence configured to form a complex with a retrotransposase; and
(b) a retrotransposase configured to transpose the cargo nucleotide sequence to a target nucleic acid sequence and comprising an amino acid sequence having at least 75% sequence identity to any one of SEQ ID NOs: 719-728.

56. The engineered retrotransposase system of claim 55, wherein the retrotransposase is encoded by a nucleic acid sequence having at least 80% sequence identity to any one of SEQ ID NOs: 278-297.

57. An engineered retrotransposase system, comprising:
(a) a double-stranded nucleic acid comprising a cargo nucleotide sequence configured to form a complex with a retrotransposase; and
(b) a retrotransposase configured to transpose the cargo nucleotide sequence to a target nucleic acid sequence and comprising an amino acid sequence having at least 75% sequence identity to any one of SEQ ID NOs: 729-733.

58. The engineered retrotransposase system of claim 57, wherein the retrotransposase is encoded by a nucleic acid sequence having at least 80% sequence identity to any one of SEQ ID NOs: 298-307.

59. An engineered retrotransposase system, comprising:
(a) a double-stranded nucleic acid comprising a cargo nucleotide sequence configured to form a complex with a retrotransposase; and
(b) a retrotransposase configured to transpose the cargo nucleotide sequence to a target nucleic acid sequence and comprising an amino acid sequence having at least 75% sequence identity to any one of SEQ ID NOs: 734-735 and 1546-1553.

60. The engineered retrotransposase system of claim 59, wherein the retrotransposase is encoded by a nucleic acid sequence having at least 80% sequence identity to any one of SEQ ID NOs: 1558-1567, 1571-1580, and 1783-1784.

61. An engineered retrotransposase system, comprising:
(a) a double-stranded nucleic acid comprising a cargo nucleotide sequence configured to form a complex with a retrotransposase; and
(b) a retrotransposase configured to transpose the cargo nucleotide sequence to a target nucleic acid sequence and comprising an amino acid sequence having at least 75% sequence identity to SEQ ID NO: 1038 or SEQ ID NO: 2160.

62. The engineered retrotransposase system of claim 61, wherein the retrotransposase is encoded by a nucleic acid sequence having at least 80% sequence identity to SEQ ID NO: 1692.

63. An engineered retrotransposase system, comprising:
(a) a double-stranded nucleic acid comprising a cargo nucleotide sequence configured to form a complex with a retrotransposase; and
(b) a retrotransposase configured to transpose the cargo nucleotide sequence to a target nucleic acid sequence and comprising an amino acid sequence having at least 75% sequence identity to SEQ ID NO: 1554.

64. The engineered retrotransposase system of claim 63, wherein the retrotransposase is encoded by a nucleic acid sequence having at least 80% sequence identity to SEQ ID NO: 1568 or SEQ ID NO: 1594.

65. The engineered retrotransposase system of any one of claims 1-64, wherein the retrotransposase comprises one or more nuclear localization sequences (NLSs) proximal to an N- or C-terminus of the retrotransposase.

66. The engineered retrotransposase system of claim 65, wherein the NLS comprises a sequence at least 80% identical to a sequence from the group consisting of SEQ ID NO: 1477-1492.

67. The engineered retrotransposase system of claim 65, wherein the NLS comprises SEQ ID NO: 1478.

68. The engineered retrotransposase system of claim 65, wherein the NLS is proximal to the N-terminus of the retrotransposase.

69. The engineered retrotransposase system of claim 65, wherein the NLS comprises SEQ ID NO: 1477.

70. The engineered retrotransposase system of claim 65, wherein the NLS is proximal to the C-terminus of the retrotransposase.

71. A polypeptide comprising a reverse transcriptase comprising an amino acid sequence having at least 75% sequence identity to any one of SEQ ID NOs: 1-29, 393-735, 799-895, 1020-1476, 1544-1554, 1850-2160, 2165-2210, and 2258-2266 fused N- or C-terminally to a non-retrotransposase domain or an affinity tag.

72. The polypeptide of claim 71, wherein the non-retrotransposase domain is an RNA-binding protein domain.

73. The polypeptide of claim 72, wherein the RNA binding protein domain comprises a bacteriophage MS2 coat protein (MCP) domain.

74. A nucleic acid encoding the engineered retrotransposase system of any one of claims 1-64 or the polypeptide of any one of claims 71-73.

75. A method for modifying a target nucleic acid sequence comprising contacting the target nucleic acid sequence using the engineered nuclease system of any one of claims 1-64.

76. The method of claim 75, wherein modifying the target nucleic acid sequence comprises binding, nicking, or cleaving, the target nucleic acid sequence.

77. The method of any one of claims 75-76, wherein the target nucleic acid sequence comprises genomic DNA, viral DNA, viral RNA, or bacterial DNA.

78. The method of any one of claims 75-76, wherein the target nucleic acid sequence comprises deoxyribonucleic acid (DNA).

79. The method of any one of claims 75-78, wherein the modification is in vitro.

80. The method of any one of claims 75-78, wherein the modification is in vivo.

81. The method of any one of claims 75-78, wherein the modification is ex vivo.

82. A method of modifying a target nucleic acid sequence in a mammalian cell comprising contacting the mammalian cell using the engineered nuclease system of any one of claims 1-64.

83. A method for synthesizing complementary DNA (cDNA), comprising:
(a) providing an RNA molecule as a template for cDNA synthesis,
(b) providing a primer oligonucleotide to initiate cDNA synthesis from the RNA molecule; and
(c) synthesizing cDNA initiated by the primer oligonucleotide from the template using a reverse transcriptase comprising a sequence having at least 80% sequence identity to a reverse transcriptase domain of any one of SEQ ID NOs: 1-29, 393-735, 799-895, 1020-1476, 1544-1554, 1850-2160, 2165-2210, and 2258-2266.

84. The method of claim 83, wherein the primer oligonucleotide comprises an oligo (dT) sequence or a degenerate sequence of at least six oligonucleotides.

85. A vector comprising the nucleic acid of claim 74.

86. The vector of claim 85, wherein the vector is a plasmid, a minicircle, a CELiD, an adeno-associated virus (AAV) derived virion, or a lentivirus.

87. A cell comprising the engineered nuclease system of any one of claims 1-64 or the polypeptide of any one of claims 71-73.

88. The cell of claim 87, wherein the cell is a eukaryotic cell.

89. The cell of claim 87, wherein the cell is a mammalian cell.

90. The cell of claim 87, wherein the cell is an immortalized cell.

91. The cell of claim 87, wherein the cell is an insect cell.

92. The cell of claim 87, wherein the cell is a yeast cell.

93. The cell of claim 87, wherein the cell is a plant cell.

94. The cell of claim 87, wherein the cell is a fungal cell.

95. The cell of claim 87, wherein the cell is a prokaryotic cell.

96. The cell of claim 87, wherein the cell is an A549, HEK-293, HEK-293T, BHK, CHO, HeLa, MRC5, Sf9, Cos-1, Cos-7, Vero, BSC 1, BSC 40, BMT 10, WI38, HeLa, Saos, C2C12, L cell, HT1080, HepG2, Huh7, K562, primary cell, or a derivative thereof.

97. The cell of claim 87, wherein the cell is an engineered cell.

98. The cell of claim 87, wherein the cell is a stable cell.
